(19) United States
(12) Patent Application Publication
(10) Pub. No.: US 2019/0000940 A1
(43) Pub. Date: Jan. 3, 2019

(54) COMPOSITIONS AND METHODS FOR THE TREATMENT OF AADC DEFICIENCY

(71) Applicant: Voyager Therapeutics, Inc., Cambridge, MA (US)

(72) Inventors: Robert Kotin, Boston, MA (US); Adrian Philip Kells, Arlington, MA (US); Bernard Ravina, Cambridge, MA (US)

(21) Appl. No.: 15/749,019

(22) PCT Filed: Jul. 29, 2016
(86) PCT No.: PCT/US16/44627

§ 371 Date: Jan. 30, 2018

Related U.S. Application Data
(60) Provisional application No. 62/334,604, filed on May 11, 2016.
(60) Provisional application No. 62/243,545, filed on Oct. 19, 2015.
(60) Provisional application No. 62/199,592, filed on Jul. 31, 2015.

(51) Int. Cl. A61K 38/51; A61K 48/00; A61P 25/00

(52) U.S. Cl. CPC A61K 38/51; A61P 25/00; C12Y 401/01028; A61K 48/005

(57) ABSTRACT

The invention relates to compositions and methods for the preparation, manufacture and therapeutic use of polynucleotides encoding AADC for the treatment, prophylaxis, palliation or amelioration of diseases, conditions and/or symptoms resulting from AADC deficiency and related inborn errors of neurotransmitter metabolism.

### CROSS REFERENCE TO RELATED APPLICATIONS

[0001] This application claims the benefit of U.S. Provisional Patent Application No. 62/199,592, entitled Compositions and Methods for the Treatment of AADC Deficiency, filed Jul. 31, 2015, U.S. Provisional Patent Application No. 62/243,545 entitled Compositions and Methods for the Treatment of AADC Deficiency, filed Oct. 19, 2015, U.S. Provisional Patent Application No. 62/334,604, entitled Compositions and Methods for the Treatment of AADC Deficiency, filed May 11, 2016; the contents of each of which are herein incorporated by reference in their entirety.

### REFERENCE TO SEQUENCE LISTING

[0002] The present application is being filed along with a Sequence Listing in electronic format. The Sequence Listing file, entitled 2057_1024PCT_SEQLST.txt, was created on Jul. 29, 2016 and is 4,405,208 bytes in size. The information in electronic format of the Sequence Listing is incorporated herein by reference in its entirety.

### FIELD OF THE INVENTION

[0003] The present disclosure relates to compositions, particularly nucleic acid molecules, e.g., polynucleotides encoding aromatic L-amino acid decarboxylase (AADC), for use in the treatment of AADC Deficiency (AADCD) and related childhood monoamine neurotransmitter disorders. In some embodiments polynucleotides may be encoded by or within recombinant adeno-associated viruses (AAVs).

### BACKGROUND OF THE INVENTION

[0004] Childhood neurotransmitter disorders are increasingly recognized as an expanding group of inherited neurometabolic syndromes. They are caused by disturbance in synthesis, metabolism, and homeostasis of the monoamine neurotransmitters, including the catecholamines (dopamine, norepinephrine, and epinephrine) and serotonin. Early and accurate diagnosis of childhood neurotransmitter disorders is important, as many are amenable to therapeutic intervention. Principles of treatment for childhood monoamine neurotransmitter disorders are based on an understanding of the relevant metabolic pathways. Most monoamine neurotransmitter disorders lead to reduced levels of central dopamine and/or serotonin, and monoamine neurotransmitter disorders associated with abnormal dopamine metabolism are associated with predominantly neurological phenotypes. Complete amelioration of motor symptoms is achievable in some disorders, such as Segawa's syndrome, and, in other conditions, significant improvement in quality of life can be attained with pharmacotherapy (Ng, et al., 2014, Pediatr. Drugs (2014) 16:275-291).

[0005] Defects in the AADC gene cause aromatic L-amino-acid decarboxylase deficiency (AADCD). AADCD is a progressive and debilitating neurodegenerative disease of the CNS arising as an inborn error in neurotransmitter metabolism. Thus, the disease almost always first appears at birth or early infancy. Because the AADC gene is involved in the synthesis of the neurotransmitters dopamine and serotonin, children with AADCD exhibit developmental delays, and severe neurologic dysfunction, including motor, sensory as well as involuntary muscle dysfunctions. Other clinical manifestations of AADCD include muscular hypotonia, dystonia, hypokinesia, athetosis, chorea, oculogyric crises, feeding or speech difficulty, insomnia, irritability, cyanosis, and various signs of autonomic dysfunction such as excessive sweating or temperature instability, beginning in infancy and early childhood (Brun et al., 2010, Neurology, 75(1):64-71). Response to current treatments is often disappointing.

[0006] In general, finding successful treatments for neurodegenerative diseases is particularly difficult due to the post-mitotic nature of central nervous system (CNS) neurons and the limited ability of neuronal cells to regenerate. Furthermore, because the blood-brain barrier (BBB) impedes peripheral access to the brain, there are inherent limitations on delivery of protein and peptide based therapeutics. The mature BBB serves as a protective barrier that excludes potentially damaging molecules and microorganisms based on size, charge, and lipid solubility. Consequently, the mature BBB efficiently blocks rAAV diffusion into the CNS. Thus, historically, to efficiently target the CNS using rAAV, researchers have had to resort to direct intraparenchymal injections (Manfredsson, et al., 2009, “AAV9: a potential blood-brain barrier buster.” Molecular Therapy 17(3):403-405). Overall, gene therapeutic approaches allowing the delivery of genes engineered for efficient CNS expression may be the most promising platform for treatment, prophylaxis and/or amelioration of CNS neurodegenerative disorders. (Feng and Maguire-Zeiss, 2010, CNS Drugs 24(3):177-192).

[0007] Because pharmacological treatment has only marginal effects on some of the symptoms and does not change early childhood mortality, gene therapy is the strategy of choice for treating AADCD. However, the current gene therapy for AADC deficiency only targets the putamen, leaving other areas in the brain and body untreated (Hwu, W. L., et al., 2012. Gene therapy for aromatic L-amino acid decarboxylase deficiency. Sci. Transl. Med. Vol. 4, 134ra61). Another shortcoming of some studies is that AAV2 does not undergo retrograde axonal transport in the brain and putaminally-infused vector would not be expected to transduce affected catecholaminergic neurons with any appreciable efficiency. Furthermore, anterograde transport of AAV2 and its payload after putaminal infusion resulted in AADC expression in many non-targeted nuclei such as globus pallidus, subthalamic nucleus and substantia nigra pars reticulata (SNpr).

[0008] Thus, a long-felt need remains for gene therapies for the treatment, amelioration, palliation or prophylaxis of AADCD and related inborn errors of neurotransmitter metabolism; such therapies may augment the diminished neurotransmitter(s), by directly or indirectly increasing their production, extending their half-life and/or decreasing their metabolism.

[0009] The adeno-associated virus (AAV) is a member of the parvovirus family and has emerged as an attractive vector for gene therapy in large part because this virus is apparently non-pathogenic; in fact, AAV has not been associated with any human disease. Further appeal is due to its ability to transduce dividing and non-diving cells (including efficient transduction of neurons), diminished proinflammatory and immune responses in humans, its inability to autonomously replicate without a helper virus (AAV is a helper-dependent DNA parvovirus which belongs to the genus Dependovirus), and its long-term gene expression. Although over 10 recombinant AAV serotypes (rAAV) have been engineered into vectors, rAAV2 is the most frequently employed serotype for gene therapy trials. Additional rAAV serotypes have been developed and tested in animal models that are more efficient at neuronal transduction.

[0010] The present disclosure provides improved nucleic acid constructs, e.g., polynucleotides, for use with AAV-derived vectors comprising the polynucleotides encoding aromatic L-amino acid decarboxylase (AADC) gene sequence (also known as “DOPA decarboxylase” or “DDC” and identified as gene/locus MIM number 107930 on chromosome 7p12) which encodes a full-length AADC protein for the purpose of gene therapy in the treatment of AADCD.

### SUMMARY OF THE INVENTION

[0011] Described herein are methods, processes, compositions kits and devices for the administration of AADC polynucleotides encoded by or contained within recombinant adeno-associated viruses (AAV) or viral particles for the treatment, prophylaxis, palliation and/or amelioration of AADCD and related inborn errors of neurotransmitter metabolism.

[0012] In one aspect, the present invention provides a method of treating AADC deficiency or a related childhood monoamine neurotransmitter disorder by administering a composition which may have at least one AAV particle, to the substantia nigra pars compacta of a subject in need of treatment or amelioration of said disorder. In one aspect, the subject in need of treatment is a human between 2 and 8 years old. The AAV particle of the invention may include an AADC polynucleotide with at least 95% identity to SEQ ID NOs 2-24. In one aspect, the AADC polynucleotide may have 99% identity to SEQ ID NOs 2-24.

[0013] In another aspect, the present invention provides a method of treating AADC deficiency or a related childhood monoamine neurotransmitter disorder by administering a composition which may have at least one AAV particle, to the putamen of a subject in need of treatment or amelioration of said disorder. The AAV particle of the invention may include an AADC polynucleotide with at least 95% identity to SEQ ID NOs 2-24.

[0014] In another aspect, the present invention provides a method of improving the sleep-wake cycle of a subject by administering to the subject a composition which may include at least one AAV particle to the putamen of a subject in need of treatment or amelioration of said disorder, wherein the AAV particle may include an AADC polynucleotide such as, but not limited to, SEQ ID NOs 2-24 or variants having at least 95% identity thereto.

[0015] In another aspect, the present invention provides a method of treating a sleep disorder by administering to the subject a composition which may include at least one AAV particle to the putamen of a subject in need of treatment or amelioration of said disorder, wherein the AAV particle may include an AADC polynucleotide such as, but not limited to, SEQ ID NOs 2-24 or variants having at least 95% identity thereto.

[0016] The AAV particle of the present invention may include a capsid serotype such as, but not limited to, AAV1, AAV2, AAV2G9, AAV3, AAV3a, AAV3b, AAV3-3, AAV4, AAV4-4, AAV5, AAV6, AAV6.1, AAV6.2, AAV6.1.2, AAV7, AAV7.2, AAV8, AAV9, AAV9.11, AAV9.13, AAV9.16, AAV9.24, AAV9.45, AAV9.47, AAV9.61, AAV9.68, AAV9.84, AAV9.9, AAV10, AAV11, AAV12, AAV16.3, AAV24.1, AAV27.3, AAV42.12, AAV42-1b, AAV42-2, AAV42-3a, AAV42-3b, AAV42-4, AAV42-5a, AAV42-5b, AAV42-6b, AAV42-8, AAV42-10, AAV42-11, AAV42-12, AAV42-13, AAV42-15, AAV42-aa, AAV43-1, AAV43-12, AAV43-20, AAV43-21, AAV43-23, AAV43-25, AAV43-5, AAV44.1, AAV44.2, AAV44.5, AAV223.1, AAV223.2, AAV223.4, AAV223.5, AAV223.6, AAV223.7, AAV1-7/rh.48, AAV1-8/rh.49, AAV2-15/rh.62, AAV2-3/rh.61, AAV2-4/rh.50, AAV2-5/rh.51, AAV3.1/hu.6, AAV3.1/hu.9, AAV3-9/rh.52, AAV3-11/rh.53, AAV4-8/rl 1.64, AAV4-9/rh.54, AAV4-19/rh.55, AAV5-3/rh.57, AAV5-22/rh.58, AAV7.3/hu.7, AAV16.8/hu.10, AAV16.12/hu.11, AAV29.3/bb.1, AAV29.5/bb.2, AAV106.1/hu.37, AAV114.3/hu.40, AAV127.2/hu.41, AAV127.5/hu.42, AAV128.3/hu.44, AAV130.4/hu.48, AAV145.1/hu.53, AAV145.5/hu.54, AAV145.6/hu.55, AAV161.10/hu.60, AAV161.6/hu.61, AAV33.12/hu.17, AAV33.4/hu.15, AAV33.8/hu.16, AAV52/hu.19, AAV52.1/hu.20, AAV58.2/hu.25, AAVA3.3, AAVA3.4, AAVA3.5, AAVA3.7, AAVC1, AAVC2, AAVC5, AAV-DJ, AAV-DJ8, AAVF3, AAVF5, AAVH2, AAVrh.72, AAVhu.8, AAVrh.68, AAVrh.70, AAVpi.1, AAVpi.3, AAVpi.2, AAVrh.60, AAVrh.44, AAVrh.65, AAVrh.55, AAVrh.47, AAVrh.69, AAVrh.45, AAVrh.59, AAVhu.12, AAVH6, AAVLK03, AAVH-1/hu.1, AAVH-5/hu.3, AAVLG-10/rh.40, AAVLG-4/rh.38, AAVLG-9/hu.39, AAVN721-8/rh.43, AAVCh.5, AAVCh.5R1, AAVcy.2, AAVcy.3, AAVcy.4, AAVcy. 5, AAVCy.5R1, AAVCy. 5R2, AAVCy.5R3, AAVCy. 5R4, AAVcy.6, AAVhu.1, AAVhu.2, AAVhu.3, AAVhu.4, AAVhu.5, AAVhu.6, AAVhu.7, AAVhu.9, AAVhu.10, AAVhu.11, AAVhu.13, AAVhu.15, AAVhu.16, AAVhu.17, AAVhu.18, AAVhu.20, AAVhu.21, AAVhu.22, AAVhu.23.2, AAVhu.24, AAVhu.25, AAVhu.27, AAVhu.28, AAVhu.29, AAVhu.29R, AAVhu.31, AAVhu.32, AAVhu.34, AAVhu.35, AAVhu.37, AAVhu.39, AAVhu.40, AAVhu.41, AAVhu.42, AAVhu.43, AAVhu.44, AAVhu.44R1, AAVhu.44R2, AAVhu.44R3, AAVhu.45, AAVhu.46, AAVhu.47, AAVhu.48, AAVhu.48R1, AAVhu.48R2, AAVhu.48R3, AAVhu.49, AAVhu.51, AAVhu.52, AAVhu.54, AAVhu.55, AAVhu.56, AAVhu.57, AAVhu.58, AAVhu.60, AAVhu.61, AAVhu.63, AAVhu.64, AAVhu.66, AAVhu.67, AAVhu.14/9, AAVhu.t 19, AAVrh.2, AAVrh.2R, AAVrh.8, AAVrh.8R, AAVrh.10, AAVrh.12, AAVrh.13, AAVrh.13R, AAVrh.14, AAVrh.17, AAVrh.18, AAVrh.19, AAVrh.20, AAVrh.21, AAVrh.22, AAVrh.23, AAVrh.24, AAVrh.25, AAVrh.31, AAVrh.32, AAVrh.33, AAVrh.34, AAVrh.35, AAVrh.36, AAVrh.37, AAVrh.37R2, AAVrh.38, AAVrh.39, AAVrh.40, AAVrh.46, AAVrh.48, AAVrh.48.1, AAVrh.48.1.2, AAVrh.48.2, AAVrh.49, AAVrh.51, AAVrh.52, AAVrh.53, AAVrh.54, AAVrh.56, AAVrh.57, AAVrh.58, AAVrh.61, AAVrh.64, AAVrh.64R1, AAVrh.64R2, AAVrh.67, AAVrh.73, AAVrh.74, AAVrh8R, AAVrh8R A586R mutant, AAVrh8R R533A mutant, AAAV, BAAV, caprine AAV, bovine AAV, AAVhE1.1, AAVhEr1.5, AAVhER1.14, AAVhEr1.8, AAVhEr1.16, AAVhEr1.18, AAVhEr1.35, AAVhEr1.7, AAVhEr1.36, AAVhEr2.29, AAVhEr2.4, AAVhEr2.16, AAVhEr2.30, AAVhEr2.31, AAVhEr2.36, AAVhER1.23, AAVhEr3.1, AAV2.5T, AAV-PAEC, AAV-LK01, AAV-LK02, AAV-LK03, AAV-LK04, AAV-LK05, AAV-LK06, AAV-LK07, AAV-LK08, AAV-LK09, AAV-LK10, AAV-LK11, AAV-LK12, AAV-LK13, AAV-LK14, AAV-LK15, AAV-LK16, AAV-LK17, AAV-LK18, AAV-LK19, AAV-PAEC2, AAV-PAEC4, AAV-PAEC6, AAV-PAEC7, AAV-PAEC8, AAV-PAEC11, AAV-PAEC12, AAV-2-pre-miRNA-101, AAV-8h, AAV-8b, AAV-h, AAV-b, AAV SM 10-2, AAV Shuffle 100-1, AAV Shuffle 100-3, AAV Shuffle 100-7, AAV Shuffle 10-2, AAV Shuffle 10-6, AAV Shuffle 10-8, AAV Shuffle 100-2, AAV SM 10-1, AAV SM 10-8, AAV SM 100-3, AAV SM 100-10, BNP61 AAV, BNP62 AAV, BNP63 AAV, AAVrh.50, AAVrh.43, AAVrh.62, AAVrh.48, AAVhu.19, AAVhu.11, AAVhu.53, AAV4-8/rh.64, AAVLG-9/hu.39, AAV54.5/hu.23, AAV54.2/hu.22, AAV54.7/hu.24, AAV54.1/hu.21, AAV54.4R/hu.27, AAV46.2/hu.28, AAV46.6/hu.29, AAV128.1/hu.43, true type AAV (ttAAV), UPENN AAV 10, Japanese AAV 10, AAV CBr-7.1, AAV CBr-7.10, AAV CBr-7.2, AAV CBr-7.3, AAV CBr-7.4, AAV CBr-7.5, AAV CBr-7.7, AAV CBr-7.8, AAV CBr-B7.3, AAV CBr-B7.4, AAV CBr-E1, AAV CBr-E2, AAV CBr-E3, AAV CBr-E4, AAV CBr-E5, AAV CBr-e5, AAV CBr-E6, AAV CBr-E7, AAV CBr-E8, AAV CHt-1, AAV CHt-2, AAV CHt-3, AAV CHt-6.1, AAV CHt-6.10, AAV CHt-6.5, AAV CHt-6.6, AAV CHt-6.7, AAV CHt-6.8, AAV CHt-P1, AAV CHt-P2, AAV CHt-P5, AAV CHt-P6, AAV CHt-P8, AAV CHt-P9, AAV CKd-1, AAV CKd-10, AAV CKd-2, AAV CKd-3, AAV CKd-4, AAV CKd-6, AAV CKd-7, AAV CKd-8, AAV CKd-B1, AAV CKd-B2, AAV CKd-B3, AAV CKd-B4, AAV CKd-B5, AAV CKd-B6, AAV CKd-B7, AAV CKd-B8, AAV CKd-H1, AAV CKd-H2, AAV CKd-H3, AAV CKd-H4, AAV CKd-H5, AAV CKd-H6, AAV CKd-N3, AAV CKd-N4, AAV CKd-N9, AAV CLg-F1, AAV CLg-F2, AAV CLg-F3, AAV CLg-F4, AAV CLg-F5, AAV CLg-F6, AAV CLg-F7, AAV CLg-F8, AAV CLv-1, AAV CLv1-1, AAV Clv1-10, AAV CLv1-2, AAV CLv-12, AAV CLv1-3, AAV CLv-13, AAV CLv1-4, AAV Clv1-7, AAV Clv1-8, AAV Clv1-9, AAV CLv-2, AAV CLv-3, AAV CLv-4, AAV CLv-6, AAV CLv-8, AAV CLv-D1, AAV CLv-D2, AAV CLv-D3, AAV CLv-D4, AAV CLv-D5, AAV CLv-D6, AAV CLv-D7, AAV CLv-D8, AAV CLv-E1, AAV CLv-K1, AAV CLv-K3, AAV CLv-K6, AAV CLv-L4, AAV CLv-L5, AAV CLv-L6, AAV CLv-M1, AAV CLv-M11, AAV CLv-M2, AAV CLv-M5, AAV CLv-M6, AAV CLv-M7, AAV CLv-M8, AAV CLv-M9, AAV CLv-R1, AAV CLv-R2, AAV CLv-R3, AAV CLv-R4, AAV CLv-R5, AAV CLv-R6, AAV CLv-R7, AAV CLv-R8, AAV CLv-R9, AAV CSp-1, AAV CSp-10, AAV CSp-11, AAV CSp-2, AAV CSp-3, AAV CSp-4, AAV CSp-6, AAV CSp-7, AAV CSp-8, AAV CSp-8.10, AAV CSp-8.2, AAV CSp-8.4, AAV CSp-8.5, AAV CSp-8.6, AAV CSp-8.7, AAV CSp-8.8, AAV CSp-8.9, AAV CSp-9, AAV.hu.48R3, AAV.VR-355, AAV3B, AAV4, AAV5, AAVF1/HSC1, AAVF11/HSC11, AAVF12/HSC12, AAVF13/HSC13, AAVF14/HSC14, AAVF15/HSC15, AAVF16/HSC16, AAVF17/HSC17, AAVF2/HSC2, AAVF3/HSC3, AAVF4/HSC4, AAVF5/HSC5, AAVF6/HSC6, AAVF7/HSC7, AAVF8/HSC8, and/or AAVF9/HSC9, or any variant thereof. In one aspect, the AAV serotype may be any of the AAV serotypes listed in Table 1, or any variant thereof. In one aspect the AAV serotype may be, but is not limited to, AAV6, AAVrh10, AAV9 (hu14), AAV-DJ and AAV9.47. The AAV particle which may include any of these serotypes described above, may be used for any of the methods described herein.

[0017] The AAV particle of the present invention may include an AADC polynucleotide, and the AADC polynucleotide may include a promoter region, 5′ UTR, 3′ UTR and a poly(A) signal. In one aspect the AADC polynucleotide may include at least one 5′ ITR and one 3′ ITR. In one aspect, one or more 5′ ITRs are located 5′ to the promoter region and one or more of the 3′ ITRs are located at the 3′ end of the poly(A) signal. In one aspect the promoter region may include a promoter region which may include an enhancer element, a promoter element, a first exon region, a first intron region, a second intron region and a second exon region. In one aspect, the enhancer element and the promoter element are derived from cytomegalovirus (CMV). In one aspect, wherein the first exon region is ie1 exon 1 or fragments thereof, the first intron region is ie1 intron 1 or fragments thereof, the second intron region is hβglobin intron 2 or fragments thereof and the second exon region is hβglobin exon 3 or fragments thereof. In one aspect, the poly(A) signal is derived from human growth hormone. The AAV particle which may include any of AADC polynucleotides described above, may be used for any of the methods described herein.

[0018] Any of the methods described herein may utilize a composition which includes a ratio of at least 70:30 AAV particle which may include the AADC polynucleotide to AAV particles without the AADC polynucleotide. In one aspect, the ratio of AAV particle which may include AADC polynucleotide to AAV particle without AADC polynucleotide is at least 85:15. In another aspect, the ratio of AAV particle which may include an AADC polynucleotide to AAV particle without AADC polynucleotide is 100:0.

[0019] In any of the methods described herein, during the administration of the composition to a subject in need thereof, the subject may use a compression device during the contacting of the subject with the composition. In one aspect, the compression device may reduce the likelihood of deep vein thrombosis in the subject.

[0020] The details of various embodiments of the disclosure are set forth in the description below. Other features, objects, and advantages of the disclosure will be apparent from the description and from the claims.

### DETAILED DESCRIPTION

[0021] A brief description of the AADC gene and neurotransmitter synthesis: Dopamine is the precursor of catecholaminergic hormones and is also itself a neurotransmitter in the basal ganglia. Dopamine is involved in many processes in the CNS, including motor function, cognition, mood, REM sleep and even certain behaviors. At least five types of dopamine receptors occur throughout the body and are responsible for various effects of the neurotransmitter. The cell bodies of dopamine-producing neurons are found in a region of the brain called the substantia nigra pars compacta (SNpc), and the neurons project to a part of the brain called the striatum. Overall, in the brain, dopamine is transmitted along five paths including (1) the mesolimbic-mesocortical pathway, projecting from the substantia nigra to the limbic system and neocortex, involved in the reward system and implicated in addiction; (2) the nigrostriatal pathway, which projects from the substantia nigra to the striatum and is particularly involved in producing movement; (3) the tuberoinfundibular system in which nuclei in the hypothalamus produce and release dopamine into the portal circulation of the pituitary gland to inhibit secretion of prolactin from the anterior pituitary; (4) the medullary-periventricular pathway, which consists of neurons in the motor portion of the vagus nerve, and which pathway is suspected in eating behavior; and (5) the incertohypothalamic pathway, which may play a role in the anticipatory phase of sexual interaction. Non-striatal dopamine is also made by proximal tubule cells of the kidney where it is thought to act locally.

[0022] Dopamine is largely synthesized from the amino acid tyrosine in a series of enzymatic reactions initiated by the conversion of tyrosine to L-dopa by tyrosine hydroxylase and its co-factor tetrahydrobiopterin. L-dopa (a.k.a. levodopa) is then decarboxylated by aromatic L-amino acid decarboxylase (AADC) to form dopamine. AADC is a homodimeric pyridoxal phosphate-dependent enzyme involved in the synthesis of not only dopamine; it also decarboxylates L-5-hydroxytryptophan to serotonin and L-tryptophan to tryptamine. Dopamine is responsible for reward-driven learning, voluntary movement control, feeding, neuroendocrine secretion, cognition, and behavior. Serotonin has important neuromodulatory actions in cognitive, emotional, impulse control, circadian rhythm, sleep-wake cycle, pain, respiratory, and cardiovascular functions.

[0023] As an inborn error of metabolism, defects in the AADC gene result in a deficit of dopamine, serotonin and, manifesting in infancy as various and several neurological and developmental delays. In some cases of AADCD, biochemical symptoms include very low concentrations of homovanillic acid (HVA) and 5-hydroxy indole acetic acid (5-HIAA) in cerebrospinal fluid (CSF). Levels of 3-methoxy-4-hydroxyphenolglycole and norepinephrine may also be reduced. Also noted are a significant elevation in the urinary excretion of L-DOPA, 5-hydroxytryptophan (5HTP), and 3-methoxytyrosine, all of which precede the AADC enzymatic step in the biochemical pathway. AADC enzyme activity is severely reduced in plasma and in liver tissue (˜1% of control); thus, serotonin and dopamine synthesis are both affected in the central and peripheral nervous systems. About 24% of patients have an abnormal brain MRI, with cerebral atrophy, degenerative changes of the white matter, thinning of the corpus callosum, or a leukodystrophy-like pattern (Brun et al., 2010, Neurology, 75(1):64-71).

[0024] AADC deficiency has an increased prevalence in the Taiwanese population due to a founder mutation IVS6+4 A>T. In one report, 13 of the 16 mutated alleles (81.3%) in Taiwanese patients with AADC deficiency carried the IVS6+4 A>T mutation. Most Taiwanese patients with AADC deficiency present with oculogyric crisis and hypotonia before 1 year of age (H. F. Lee, et al., 2009, “Aromatic L-amino acid decarboxylase deficiency,” Taiwan. Eur. J. Paediatr. Neurol. 13:135-140).

[0025] Neurotransmitter replacement therapies (e.g., administration of levodopa) have been used to treat Parkinson's Disease (PD), a relatively common neurological disorder in which degeneration of a group of dopaminergic neurons in the midbrain leads to a deficiency of dopamine in the striatum. However, such pharmacotherapeutic techniques often yield diminishing benefits as the disease progresses and dopamine-generating cells die. Furthermore, systemic administration of high-dose dopamine is complicated by side effects, such as fluctuations in motor performance, dyskinesias, and hallucinations, resulting from dopaminergic stimulation of the mesolimbic system.

[0026] An early study in a rat model of PD showed that, upon adeno-associated virus (AAV)-AADC transduction, the transgenic AADC is able to decarboxylate exogenous L-DOPA more efficiently, such that a dose of L-DOPA previously ineffective before gene transfer was able to elicit a positive motor behavioral response following gene transfer. In animals receiving AAV2-AADC, dopamine production was restored to 50% of normal levels 12 weeks after the infusion. Microdialysis experiments demonstrated an in vivo enhanced conversion of L-DOPA to dopamine, but no storage capacity as dopamine was released to the extracellular space in a continuous, nonregulated fashion. It was suggested that, in addition to the potential clinical benefit of improving decarboxylation efficiency in Parkinson's disease, this approach might have some relevance for the treatment of AADC deficiency (Sanchez-Pernaute, et al., 2001, “Functional effect of adeno-associated virus mediated gene transfer of aromatic 1-amino acid decarboxylase into the striatum of 6-OHDA-lesioned rats.” Mol. Ther. 4:324-330).

[0027] In a primate model of PD, a mixture of three separate AAV vectors expressing tyrosine hydroxylase (TH), AADC, and GTP cyclohydrolase I (GCH) was stereotaxically injected into the unilateral putamen of 1-methyl-4-phenyl-1,2,3,6-tetrahydropyridine-treated monkeys, and coexpression of the enzymes in the unilateral putamen resulted in improvement in manual dexterity on the side contralateral to the AAV-TH/-AADC/-GCH-injected side, which persisted during the observation period (Muramatsu, et al., 2002, “Behavioral recovery in a primate model of Parkinson's disease by triple transduction of striatal cells with adeno-associated viral vectors expressing dopamine-synthesizing enzymes.” Hum. Gene Ther. 13: 345-354). Another study employing gene therapy to deliver AADC by intraputaminal infusion resulted in restored dopaminergic function and minimized side effects. The adeno-associated virus (AAV) serotype 2 vector, AAV-hAADC-2, was found to increase extracellular dopamine in the striatum after administration of levodopa (Muramatsu, et al., 2010, “A phase I study of aromatic L-amino acid decarboxylase gene therapy for Parkinson's disease.” Mol. Ther. 18:1731-1735; Forsayeth, J., et al., 2010, “Gene therapy for Parkinson's disease: Where are we now and where are we going?” Expert Review of Neurotherapeutics 10 (12): 1839). To treat the main symptoms of AADC-deficiency include motor impairment, a similar gene therapy approach has been suggested (Allen, et al., 2009, “A new perspective on the treatment of aromatic L-amino acid decarboxylase deficiency.” Mol. Genet. Metab. 97:6-14).

[0028] An AADC deficient murine model has been developed, by inserting an AADC gene mutation (IVS6+4A>T) and a neomycin-resistance gene into intron 6 of the mouse AADC (Ddc) gene. In the brains of homozygous knock-in (KI) mice (Ddc^{IVS6/IVS6}), AADC mRNA lacked exon 6, and AADC activity was <0.3% of that in wild-type mice. Half of the KI mice were born alive but grew poorly and exhibited severe dyskinesia and hind limb clasping after birth. Two-thirds of the live-born KI mice survived the weaning period, with subsequent improvements in their growth and motor functions; however, these mice still displayed cardiovascular dysfunction and behavioral problems due to serotonin deficiencies. The brain dopamine levels in the KI mice increased from 9.39% of the levels in wild-type mice at 2 weeks of age to 37.86% of the levels in wild-type mice at 8 weeks of age. Adult KI mice also exhibited an exaggerated response to apomorphine and an elevation of striatal c-Fos expression, suggesting post-synaptic adaptations; thus, compensatory regulation apparently allowed these mice to survive to adulthood (Lee, et al., 2013, Neurobiology of Disease 52:177-190).

[0029] In AADC-deficient children, a recent gene replacement clinical trial explored putaminal delivery of recombinant adeno-associated virus serotype 2 vector encoding human AADC (AAV2-hAADC). Unfortunately, the AADCD patients showed only modest amelioration of motor symptoms, hypothesized to be due to insufficient transduction of the putamen. With the development of a highly accurate MRI-guided cannula placement technology, a more effective approach targeted the affected mid-brain neurons directly. Transduction of AADC-deficient dopaminergic neurons in the substantia nigra with locally infused AAV2-hAADC was expected to lead to restoration of normal dopamine levels in affected children. The long-term safety and tolerability of bilateral AAV2-hAADC MRI-guided pressurized infusion into the mid-brain was also assessed in non-human primates; the animals received either vehicle, low or high AAV2-hAADC vector dose and were euthanized 1, 3 or 9 months after surgery, and effective mid-brain transduction was achieved without untoward effects (San Sebastian, et al., 2014, Mol. Ther. Methods Clin. Dev. 3: 14049).

[0030] Pharmacotherapeutic techniques have also been used to treat AADCD. Clinical management of AADCD usually involves pyridoxine (B6)/pyridoxal phosphate, dopamine agonists, and monoamine oxidase B inhibitors to potentiate monoaminergic transmission, in attempt to provide some improvement in tone and movement. Standard treatments for AADCD are: Pyridoxine 20-160 mg/kg/day; Folinic acid (calcium folinate) 15 mg/day [BNFC 2014]; Dopamine agonists: Rotigotine, patch dose as per BNFC; 2, 4, 6, 8 mg dose patches available and applied once a day (doses 0.17-0.25 mg/kg/day used) (other dopamine agonists used; pergolide, bromocriptine, pramipexole, ropinirole); MAOI selegiline 0.03-2 mg/kg/day; Trihexyphenydyl 1-12 mg/day titrated (often higher doses are tolerated but titrated slowly); Benztropine 1-4 mg/day; Clonidine 0.1-3 total mg/day (BNFC initial test dose is recommended with higher doses used with caution due to antihypertensive action); Benzodiazepines (Ng, et al., 2014, Pediatr. Drugs (2014) 16:275-291). However, in some cases, such treatments were found not to be very beneficial. Furthermore, in assessing treatment response among one group of AADC patients, a sex difference in the monoaminergic system was observed: a subgroup of five males responded to treatment and made developmental progress, while a second subgroup of five females and one male responded poorly to treatment and often developed drug-induced dyskinesias. Thus, females appeared more dependent on the dopamine system (Pons et al., 2004, Neurology 62:1058-1065).

[0031] In one embodiment, the nucleic acid constructs described herein may comprise at least a 5′-ITR and a 3′-ITR, each or both of which may be derived from an AAV, positioned about a DDC gene sequence, as well as additional components required for gene expression and clone selection.

### Compositions of the Invention

[0032] According to the present invention, AADC polynucleotides (specifically, novel SEQ ID Nos. 2 to 24) are provided which function alone or combinations thereof with additional nucleic acid sequence(s) to encode the AADC protein. As used herein an “AADC polynucleotide” is any nucleic acid which encodes an AADC protein and when present in a vector, plasmid or translatable construct, expresses such AADC protein in a cell, tissue, organ or organism.

[0033] AADC polynucleotides include precursor molecules which are processed inside the cell. AADC polynucleotides, or the processed forms thereof, may be encoded in a plasmid, vector, genome or other nucleic acid expression vector for delivery to a cell.

[0034] In some embodiments AADC polynucleotides are designed as components of AAV viral genomes and packaged in AAV viral particles which are processed within the cell to produce the wild type AADC protein.

[0035] As used herein, the wild type AADC protein may be any of the naturally occurring isoforms or variants from the DDC gene. Multiple alternatively spliced transcript variants encoding different isoforms of AADC have been identified. Specifically, the DDC gene produces seven transcript variants that encode six distinct isoforms. DDC transcript variants 1 and 2 both encode AADC isoform 1. In some embodiments, the AADC polynucleotides encode DDC transcript variant 2, thereby encoding a native AADC isoform 1 (NCBI Reference Sequence: NP_000781.1), which amino acid sequence is identified here as SEQ ID NO:1:

MNASEFRRRGKEMVDYVANYMEGIEGRQVYPDVEPGYLRPLIPAAAPQEP
DTFEDIINDVEKIIMPGVTHWHSPYFFAYFPTASSYPAMLADMLCGAIGC
IGFSWAASPACTELETVMMDWLGKMLELPKAFLNEKAGEGGGVIQGSASE
ATLVALLAARTKVIHRLQAASPELTQAAIMEKLVAYSSDQAHSSVERAGL
IGGVKLKAIPSDGNFAMRASALQEALERDKAAGLIPFFMVATLGTTTCCS
FDNLLEVGPICNKEDIWLHVDAAYAGSAFICPEFRHLLNGVEFADSFNFN
PHKWLLVNFDCSAMWVKKRTDLTGAFRLDPTYLKHSHQDSGLITDYRHWQ
IPLGRRFRSLKMWFVFRMYGVKGLQAYIRKHVQLSHEFESLVRQDPRFEI
CVEVILGLVCFRLKGSNKVNEALLQRINSAKKIHLVPCHLRDKFVLRFAI
CSRTVIESAHVQRAWEHIKELAADVLRAERE.

[0036] The AADC polynucleotides disclosed herein may be engineered to contain modular elements and/or sequence motifs assembled to create AADC polynucleotide constructs.

### AADC Polynucleotide Constructs

[0037] In some embodiments, the AADC polynucleotide comprises a sequence of any of SEQ ID NOs: 2 to 24, or a fragment thereof. Such polynucleotides comprise nucleic acids which comprise a region of linked nucleosides encoding one or more isoforms or variants of the AADC protein.

[0038] In some embodiments, the AADC polynucleotide comprises a codon optimized transcript encoding an AADC protein.

[0039] In one embodiment, the AADC polynucleotide comprises a sequence which has a percent identity to any of SEQ ID NOs: 2-24. The AADC polynucleotide may have 1%, 2%, 3%, 4%, 5%, 6%, 7%, 8%, 9%, 10%, 15%, 20%, 25%, 30%, 35%, 40%, 45%, 50%, 55%, 60%, 65%, 70%, 75%, 80%, 85%, 90%, 95%, 99% or 100% identity to any of SEQ ID NOs: 2-24. The AADC polynucleotide may have 1-10%, 10-20%, 30-40%, 50-60%, 50-70%, 50-80%, 50-90%, 50-99%, 50-100%, 60-70%, 60-80%, 60-90%, 60-99%, 60-100%, 70-80%, 70-90%, 70-99%, 70-100%, 80-85%, 80-90%, 80-95%, 80-99%, 80-100%, 90-95%, 90-99%, or 90-100% to any of SEQ ID NOs: 2-24. As a non-limiting example, the AADC polynucleotide comprises a sequence which has 80% identity to any of SEQ ID NOs 6, 7, 8, 9, 17, 18, 19, 20, 21, 22, 23 and 24. As another non-limiting example, the AADC polynucleotide comprises a sequence which has 85% identity to any of SEQ ID NOs 6, 7, 8, 9, 17, 18, 19, 20, 21, 22, 23 and 24. As another non-limiting example, the AADC polynucleotide comprises a sequence which has 90% identity to any of SEQ ID NOs 6, 7, 8, 9, 17, 18, 19, 20, 21, 22, 23 and 24. As another non-limiting example, the AADC polynucleotide comprises a sequence which has 95% identity to any of SEQ ID NOs 6, 7, 8, 9, 17, 18, 19, 20, 21, 22, 23 and 24. As another non-limiting example, the AADC polynucleotide comprises a sequence which has 99% identity to any of SEQ ID NOs 6, 7, 8, 9, 17, 18, 19, 20, 21, 22, 23 and 24. As a non-limiting example, the AADC polynucleotide comprises a sequence which has 80% identity to SEQ ID NO 24. As another non-limiting example, the AADC polynucleotide comprises a sequence which has 85% identity to SEQ ID NO 24. As another non-limiting example, the AADC polynucleotide comprises a sequence which has 90% identity to SEQ ID NO 24. As another non-limiting example, the AADC polynucleotide comprises a sequence which has 95% identity to SEQ ID NO 24. As another non-limiting example, the AADC polynucleotide comprises a sequence which has 99% identity to SEQ ID NO 24.

[0040] In some embodiments, the AADC polynucleotide comprises a sequence region encoding one or more wild type isoforms or variants of an AADC protein. Such polynucleotides may also comprise a sequence region encoding any one or more of the following: a 5′ ITR, a cytomegalovirus (CMV) Enhancer, a CMV Promoter, a synapsin 1 promoter, an ie1 exon 1, an ie1 intron1, intron 1 of human growth hormone, a P globin intron, an hβglobin intron2, an hβglobin exon 3, a 5′ UTR, a 3′ UTR, an hGH poly(A) signal, a simian virus 40 polyadenylation signal, a post-transcriptional regulatory element, a woodchuck hepatitis virus post-transcriptional regulatory element, and/or a 3′ ITR. Such sequence regions are taught herein or may be any of those known in the art.

[0041] In some embodiments the AADC coding region is 1440 nucleotides in length. Such an AADC polynucleotide may be codon optimized over all or a portion of the polynucleotide.

[0042] In some embodiments the AADC coding region is 1443 nucleotides in length. In such case, an additional codon may be present at the 3′ end of the polynucleotide.

[0043] In some embodiments the AADC coding region is 1449 nucleotides in length. In such case, additional codons may be present at the 3′ end of the polynucleotide.

[0044] In some embodiments, the AADC polynucleotide comprises any of SEQ ID NOs 13-24 but lacking the 5′ and/or 3′ ITRs. Such a polynucleotide may be incorporated into a plasmid or vector and utilized to express the encoded AADC protein.

[0045] In one embodiment, the AADC polynucleotide may comprise a codon optimized open reading frame of an AADC mRNA, at least one 5′ITR and at least one 3′UTR where the one or more of the 5′ITRs may be located at the 5′ end of the promoter region and one or more 3′ ITRs may be located at the 3′ end of the poly(A) signal. The AADC mRNA may comprise a promoter region, a 5′ untranslated region (UTR), a 3′UTR and a poly(A) signal. The promoter region may include, but is not limited to, enhancer element, a promoter element, a first exon region, a first intron region, a second intron region and a second exon region. As a non-limiting example, the enhancer element and the promoter element are derived from CMV. As another non-limiting example, the intron is derived from human growth factor. As another non-limiting example, the intron is derived from β globin. As another non-limiting example, the first exon region is iel exon 1 or fragments thereof, the first intron region is ie1 intron 1 or fragments thereof, the second intron region is hBglobin intron 2 or fragments thereof and the second exon region is hBglobin exon 3 or fragments thereof. As yet another non-limiting example, the poly(A) signal is derived from human growth hormone. As another non-limiting example, the poly(A) signal is derived from simian virus 40.

### Viral Vectors

[0046] The AADC polynucleotides disclosed herein can be introduced into host cells using any of a variety of approaches. Infection with a viral vector comprising the AADC polynucleotide can be effected. Examples of suitable viral vectors include replication defective retroviral vectors, adenoviral vectors, adeno-associated vectors and lentiviral vectors.

[0047] According to the present invention, viral vectors for use in therapeutics and/or diagnostics comprise a virus that has been distilled or reduced to the minimum components necessary for transduction of a nucleic acid payload or cargo of interest. In this manner, viral vectors are engineered as vehicles for specific delivery while lacking the deleterious replication and/or integration features found in wild-type virus.

[0048] As used herein, a “vector” is any molecule or moiety which transports, transduces or otherwise acts as a carrier of a heterologous molecule such as the polynucleotides described herein. A “viral vector” is a vector which comprises one or more polynucleotide regions encoding or comprising payload molecule of interest, e.g., a transgene, a polynucleotide encoding a polypeptide or multi-polypeptide.

### Viral Vectors: Adeno-Associated Virus (AAV)

[0049] Viral vectors of the present disclosure may be produced recombinantly and may be based on adeno-associated virus (AAV) parent or reference sequence. Serotypes which may be useful in the presently disclosed compositions and methods include any of those arising from AAV1, AAV2, AAV3, AAV4, AAV5, AAV6, AAV7, AAV8, AAV9, AAV9.47, AAV9(hu14), AAV10, AAV11, AAV12, AAVrh8, AAVrh10 and AAV-DJ.

[0050] AAV vectors may also comprise self-complementary AAV vectors (scAAVs). scAAV vectors contain both DNA strands which anneal together to form double stranded DNA. By skipping second strand synthesis, scAAVs allow for rapid expression in the cell.

[0051] Viruses of the Parvoviridae family are small non-enveloped icosahedral capsid viruses characterized by a single stranded DNA genome. Parvoviridae family viruses consist of two subfamilies: Parvovirinae, which infect vertebrates, and Densovirinae, which infect invertebrates. Due to its relatively simple structure, easily manipulated using standard molecular biology techniques, this virus family is useful as a biological tool. The genome of the virus may be modified to contain a minimum of components for the assembly of a functional recombinant virus, or viral particle, which is loaded with or engineered to express or deliver a desired nucleic acid construct or payload, e.g., a transgene, polypeptide-encoding polynucleotide or modulatory nucleic acid, which may be delivered to a target cell, tissue or organism.

[0052] The parvoviruses and other members of the Parvoviridae family are generally described in Kenneth I. Berns, “Parvoviridae: The Viruses and Their Replication,” Chapter 69 in FIELDS VIROLOGY (3d Ed. 1996), the contents of which are incorporated by reference in their entirety.

[0053] The Parvoviridae family comprises the Dependovirus genus which includes adeno-associated viruses (AAV) capable of replication in vertebrate hosts including, but not limited to, human, primate, bovine, canine, equine, and ovine species.

[0054] The AAV particles of the present disclosure comprise a nucleic acid sequence e.g., polynucleotide, encoding at least one “payload.” As used herein, a “payload” refers to one or more polynucleotides or polynucleotide regions encoded by or within a viral genome or an expression product of such polynucleotide or polynucleotide region e.g., a transgene, a polynucleotide encoding a polypeptide or multi polypeptide or a modulatory nucleic acid or regulatory nucleic acid. The term “AAV particle” or “AAV vector” as used herein comprises a capsid and a polynucleotide of payload. The AAV particle may be derived from any serotype, described herein or known in the art, including combinations of serotypes (i.e., “pseudotyped” AAV) or from various genomes (e.g., single stranded or self-complementary). In addition, the AAV particle may be replication defective and/or targeted.

[0055] The payload may comprise any nucleic acid known in the art which is useful for modulating the expression (by supplementation or gene replacement or by inhibition using a modulatory nucleic acid) in a target cell transduced or contacted with the AAV particle carrying the payload.

[0056] Vectors used in the production of AAV particles include those encoding the payload, e.g. payload construct vectors, and those encoding accessory proteins necessary for production, e.g. viral construct vectors.

[0057] According to the present invention, an AAV payload construct vector encodes a “payload construct.” In one embodiment, a “payload construct” is a polynucleotide sequence encoding at least a payload and sufficient ITR sequence to allow for replication thereby producing a viral genome that is packaged inside a capsid.

[0058] The payload construct may comprise a combination of coding and non-coding nucleic acid sequences.

[0059] In one embodiment, the AAV payload construct vector comprises more than one nucleic acid sequences encoding more than one payload of interest. In such an embodiment, a payload construct encoding more than one payload may be replicated and packaged into a viral particle. A target cell transduced with a viral particle comprising more than one payload may express each of the payloads in a single cell.

[0060] In some embodiments, the AAV payload construct may encode a coding or non-coding RNA.

[0061] Where the AAV payload construct sequence encodes a polypeptide, the polypeptide may be a peptide or protein. A protein encoded by the AAV payload construct sequence may comprise a secreted protein, an intracellular protein, an extracellular protein, and/or a membrane protein. The encoded proteins may be structural or functional. Proteins encoded by the payload construct vector or payload construct include, but are not limited to, mammalian proteins. The AAV polynucleotides encoding polypeptides (e.g., mRNA) described herein may be useful in the fields of human disease, antibodies, viruses, veterinary applications and a variety of in vivo and in vitro settings.

[0062] In some embodiments, the AAV particles are useful in the field of medicine for the treatment, prophylaxis, palliation or amelioration of AADCD and related childhood monoamine neurotransmitter disorders.

[0063] In some embodiments, the AAV payload construct encodes a messenger RNA (mRNA). As used herein, the term “messenger RNA” (mRNA) refers to any polynucleotide which encodes a polypeptide of interest and which is capable of being translated to produce the encoded polypeptide of interest in vitro, in vivo, in situ or ex vivo.

[0064] Traditionally, the basic components of an mRNA molecule include at least a coding region, a 5′UTR, a 3′UTR, a 5′ cap and a poly-A tail. According to the present invention, AAV payload constructs encoding mRNA may comprise a coding region only. They may also comprise a coding region and at least one UTR. They may also comprise a coding region, 3′UTR and polyA tail. In some embodiments, the mRNA or any portion of the AAV may be codon optimized.

### AAV Serotypes

[0065] In one embodiment, the AADC polynucleotide is encoded in a plasmid or vector, which may be derived from an adeno-associated virus (AAV). In one embodiment, the AAV serotype used in the present invention may be from a variety of species.

[0066] AAV particles of the present invention may comprise or be derived from any natural or recombinant AAV serotype. According to the present invention, the AAV particles may utilize or be based on a serotype selected from any of the following AAV1, AAV2, AAV2G9, AAV3, AAV3a, AAV3b, AAV3-3, AAV4, AAV4-4, AAV5, AAV6, AAV6.1, AAV6.2, AAV6.1.2, AAV7, AAV7.2, AAV8, AAV9, AAV9.11, AAV9.13, AAV9.16, AAV9.24, AAV9.45, AAV9.47, AAV9.61, AAV9.68, AAV9.84, AAV9.9, AAV10, AAV11, AAV12, AAV16.3, AAV24.1, AAV27.3, AAV42.12, AAV42-1b, AAV42-2, AAV42-3a, AAV42-3b, AAV42-4, AAV42-5a, AAV42-5b, AAV42-6b, AAV42-8, AAV42-10, AAV42-11, AAV42-12, AAV42-13, AAV42-15, AAV42-aa, AAV43-1, AAV43-12, AAV43-20, AAV43-21, AAV43-23, AAV43-25, AAV43-5, AAV44.1, AAV44.2, AAV44.5, AAV223.1, AAV223.2, AAV223.4, AAV223.5, AAV223.6, AAV223.7, AAV 1-7/rh.48, AAV 1-8/rh.49, AAV2-15/rh. 62, AAV2-3/rh.61, AAV2-4/rh.50, AAV2-5/rh.51, AAV3.1/hu.6, AAV3.1/hu.9, AAV3-9/rh.52, AAV3-11/rh.53, AAV4-8/rl 1.64, AAV4-9/rh.54, AAV4-19/rh.55, AAV5-3/rh.57, AAV5-22/rh.58, AAV7.3/hu.7, AAV16.8/hu.10, AAV16.12/hu.11, AAV29.3/bb.1, AAV29.5/bb.2, AAV106.1/hu.37, AAV114.3/hu.40, AAV127.2/hu.41, AAV127.5/hu.42, AAV128.3/hu.44, AAV130.4/hu.48, AAV145.1/hu.53, AAV145.5/hu.54, AAV145.6/hu.55, AAV161.10/hu.60, AAV161.6/hu.61, AAV33.12/hu.17, AAV33.4/hu.15, AAV33.8/hu.16, AAV52/hu.19, AAV52.1/hu.20, AAV58.2/hu.25, AAVA3.3, AAVA3.4, AAVA3.5, AAVA3.7, AAVC1, AAVC2, AAVC5, AAV-DJ, AAV-DJ8, AAVF3, AAVF5, AAVH2, AAVrh.72, AAVhu.8, AAVrh.68, AAVrh.70, AAVpi.1, AAVpi.3, AAVpi.2, AAVrh.60, AAVrh.44, AAVrh.65, AAVrh.55, AAVrh.47, AAVrh.69, AAVrh.45, AAVrh.59, AAVhu.12, AAVH6, AAVLK03, AAVH-1/hu.1, AAVH-5/hu.3, AAVLG-10/rh.40, AAVLG-4/rh.38, AAVLG-9/hu.39, AAVN721-8/rh.43, AAVCh.5, AAVCh.5R1, AAVcy.2, AAVcy.3, AAVcy.4, AAVcy.5, AAVCy.5R1, AAVCy.5R2, AAVCy.5R3, AAVCy.5R4, AAVcy.6, AAVhu.1, AAVhu.2, AAVhu.3, AAVhu.4, AAVhu.5, AAVhu.6, AAVhu.7, AAVhu.9, AAVhu.10, AAVhu.11, AAVhu.13, AAVhu.15, AAVhu.16, AAVhu.17, AAVhu.18, AAVhu.20, AAVhu.21, AAVhu.22, AAVhu.23.2, AAVhu.24, AAVhu.25, AAVhu.27, AAVhu.28, AAVhu.29, AAVhu.29R, AAVhu.31, AAVhu.32, AAVhu.34, AAVhu.35, AAVhu.37, AAVhu.39, AAVhu.40, AAVhu.41, AAVhu.42, AAVhu.43, AAVhu.44, AAVhu.44R1, AAVhu.44R2, AAVhu.44R3, AAVhu.45, AAVhu.46, AAVhu.47, AAVhu.48, AAVhu.48R1, AAVhu.48R2, AAVhu.48R3, AAVhu.49, AAVhu.51, AAVhu.52, AAVhu.54, AAVhu.55, AAVhu.56, AAVhu.57, AAVhu.58, AAVhu.60, AAVhu.61, AAVhu.63, AAVhu.64, AAVhu.66, AAVhu.67, AAVhu.14/9, AAVhu.t 19, AAVrh.2, AAVrh.2R, AAVrh.8, AAVrh.8R, AAVrh.10, AAVrh.12, AAVrh.13, AAVrh.13R, AAVrh.14, AAVrh.17, AAVrh.18, AAVrh.19, AAVrh.20, AAVrh.21, AAVrh.22, AAVrh.23, AAVrh.24, AAVrh.25, AAVrh.31, AAVrh.32, AAVrh.33, AAVrh.34, AAVrh.35, AAVrh.36, AAVrh.37, AAVrh.37R2, AAVrh.38, AAVrh.39, AAVrh.40, AAVrh.46, AAVrh.48, AAVrh.48.1, AAVrh.48.1.2, AAVrh.48.2, AAVrh.49, AAVrh.51, AAVrh.52, AAVrh.53, AAVrh.54, AAVrh.56, AAVrh.57, AAVrh.58, AAVrh.61, AAVrh.64, AAVrh.64R1, AAVrh.64R2, AAVrh.67, AAVrh.73, AAVrh.74, AAVrh8R, AAVrh8R A586R mutant, AAVrh8R R533A mutant, AAAV, BAAV, caprine AAV, bovine AAV, AAVhE1.1, AAVhEr1.5, AAVhER1.14, AAVhEr1.8, AAVhEr1.16, AAVhEr1.18, AAVhEr1.35, AAVhEr1.7, AAVhEr1.36, AAVhEr2.29, AAVhEr2.4, AAVhEr2.16, AAVhEr2.30, AAVhEr2.31, AAVhEr2.36, AAVhER1.23, AAVhEr3.1, AAV2.5T, AAV-PAEC, AAV-LK01, AAV-LK02, AAV-LK03, AAV-LK04, AAV-LK05, AAV-LK06, AAV-LK07, AAV-LK08, AAV-LK09, AAV-LK10, AAV-LK11, AAV-LK12, AAV-LK13, AAV-LK14, AAV-LK15, AAV-LK16, AAV-LK17, AAV-LK18, AAV-LK19, AAV-PAEC2, AAV-PAEC4, AAV-PAEC6, AAV-PAEC7, AAV-PAEC8, AAV-PAEC11, AAV-PAEC12, AAV-2-pre-miRNA-101, AAV-8h, AAV-8b, AAV-h, AAV-b, AAV SM 10-2, AAV Shuffle 100-1, AAV Shuffle 100-3, AAV Shuffle 100-7, AAV Shuffle 10-2, AAV Shuffle 10-6, AAV Shuffle 10-8, AAV Shuffle 100-2, AAV SM 10-1, AAV SM 10-8, AAV SM 100-3, AAV SM 100-10, BNP61 AAV, BNP62 AAV, BNP63 AAV, AAVrh.50, AAVrh.43, AAVrh.62, AAVrh.48, AAVhu.19, AAVhu.11, AAVhu.53, AAV4-8/rh.64, AAVLG-9/hu.39, AAV54.5/hu.23, AAV54.2/hu.22, AAV54.7/hu.24, AAV54.1/hu.21, AAV54.4R/hu.27, AAV46.2/hu.28, AAV46.6/hu.29, AAV128.1/hu.43, true type AAV (ttAAV), UPENN AAV 10, Japanese AAV 10 serotypes, AAV CBr-7.1, AAV CBr-7.10, AAV CBr-7.2, AAV CBr-7.3, AAV CBr-7.4, AAV CBr-7.5, AAV CBr-7.7, AAV CBr-7.8, AAV CBr-B7.3, AAV CBr-B7.4, AAV CBr-E1, AAV CBr-E2, AAV CBr-E3, AAV CBr-E4, AAV CBr-E5, AAV CBr-e5, AAV CBr-E6, AAV CBr-E7, AAV CBr-E8, AAV CHt-1, AAV CHt-2, AAV CHt-3, AAV CHt-6.1, AAV CHt-6.10, AAV CHt-6.5, AAV CHt-6.6, AAV CHt-6.7, AAV CHt-6.8, AAV CHt-P1, AAV CHt-P2, AAV CHt-P5, AAV CHt-P6, AAV CHt-P8, AAV CHt-P9, AAV CKd-1, AAV CKd-10, AAV CKd-2, AAV CKd-3, AAV CKd-4, AAV CKd-6, AAV CKd-7, AAV CKd-8, AAV CKd-B1, AAV CKd-B2, AAV CKd-B3, AAV CKd-B4, AAV CKd-B5, AAV CKd-B6, AAV CKd-B7, AAV CKd-B8, AAV CKd-H1, AAV CKd-H2, AAV CKd-H3, AAV CKd-H4, AAV CKd-H5, AAV CKd-H6, AAV CKd-N3, AAV CKd-N4, AAV CKd-N9, AAV CLg-F1, AAV CLg-F2, AAV CLg-F3, AAV CLg-F4, AAV CLg-F5, AAV CLg-F6, AAV CLg-F7, AAV CLg-F8, AAV CLv-1, AAV CLv1-1, AAV Clv1-10, AAV CLv1-2, AAV CLv-12, AAV CLv1-3, AAV CLv-13, AAV CLv1-4, AAV Clv1-7, AAV Clv1-8, AAV Clv1-9, AAV CLv-2, AAV CLv-3, AAV CLv-4, AAV CLv-6, AAV CLv-8, AAV CLv-D1, AAV CLv-D2, AAV CLv-D3, AAV CLv-D4, AAV CLv-D5, AAV CLv-D6, AAV CLv-D7, AAV CLv-D8, AAV CLv-E1, AAV CLv-K1, AAV CLv-K3, AAV CLv-K6, AAV CLv-L4, AAV CLv-L5, AAV CLv-L6, AAV CLv-M1, AAV CLv-M11, AAV CLv-M2, AAV CLv-M5, AAV CLv-M6, AAV CLv-M7, AAV CLv-M8, AAV CLv-M9, AAV CLv-R1, AAV CLv-R2, AAV CLv-R3, AAV CLv-R4, AAV CLv-R5, AAV CLv-R6, AAV CLv-R7, AAV CLv-R8, AAV CLv-R9, AAV CSp-1, AAV CSp-10, AAV CSp-11, AAV CSp-2, AAV CSp-3, AAV CSp-4, AAV CSp-6, AAV CSp-7, AAV CSp-8, AAV CSp-8.10, AAV CSp-8.2, AAV CSp-8.4, AAV CSp-8.5, AAV CSp-8.6, AAV CSp-8.7, AAV CSp-8.8, AAV CSp-8.9, AAV CSp-9, AAV.hu.48R3, AAV.VR-355, AAV3B, AAV4, AAV5, AAVF1/HSC1, AAVF11/HSC11, AAVF12/HSC12, AAVF13/HSC13, AAVF14/HSC14, AAVF15/HSC15, AAVF16/HSC16, AAVF17/HSC17, AAVF2/HSC2, AAVF3/HSC3, AAVF4/HSC4, AAVF5/HSC5, AAVF6/HSC6, AAVF7/HSC7, AAVF8/HSC8, and/or AAVF9/HSC9 and variants thereof.

[0067] As a non-limiting example, the capsid of the recombinant AAV virus is AAV2. As a non-limiting example, the capsid of the recombinant AAV virus is AAVrh10. As a non-limiting example, the capsid of the recombinant AAV virus is AAV9(hu14). As a non-limiting example, the capsid of the recombinant AAV virus is AAV-DJ. As a non-limiting example, the capsid of the recombinant AAV virus is AAV9.47. As a non-limiting example, the capsid of the recombinant AAV virus is AAV-DJ8.

[0068] In some embodiments, the AAV serotype may be, or have, a sequence as described in United States Publication No. US20030138772, the contents of which are herein incorporated by reference in their entirety, such as, but not limited to, AAV1 (SEQ ID NO: 6 and 64 of US20030138772), AAV2 (SEQ ID NO: 7 and 70 of US20030138772), AAV3 (SEQ ID NO: 8 and 71 of US20030138772), AAV4 (SEQ ID NO: 63 of US20030138772), AAV5 (SEQ ID NO: 114 of US20030138772), AAV6 (SEQ ID NO: 65 of US20030138772), AAV7 (SEQ ID NO: 1-3 of US20030138772), AAV8 (SEQ ID NO: 4 and 95 of US20030138772), AAV9 (SEQ ID NO: 5 and 100 of US20030138772), AAV10 (SEQ ID NO: 117 of US20030138772), AAV11 (SEQ ID NO: 118 of US20030138772), AAV12 (SEQ ID NO: 119 of US20030138772), AAVrh10 (amino acids 1 to 738 of SEQ ID NO: 81 of US20030138772), AAV16.3 (US20030138772 SEQ ID NO: 10), AAV29.3/bb.1 (US20030138772 SEQ ID NO: 11), AAV29.4 (US20030138772 SEQ ID NO: 12), AAV29.5/bb.2 (US20030138772 SEQ ID NO: 13), AAV1.3 (US20030138772 SEQ ID NO: 14), AAV13.3 (US20030138772 SEQ ID NO: 15), AAV24.1 (US20030138772 SEQ ID NO: 16), AAV27.3 (US20030138772 SEQ ID NO: 17), AAV7.2 (US20030138772 SEQ ID NO: 18), AAVC1 (US20030138772 SEQ ID NO: 19), AAVC3 (US20030138772 SEQ ID NO: 20), AAVC5 (US20030138772 SEQ ID NO: 21), AAVF1 (US20030138772 SEQ ID NO: 22), AAVF3 (US20030138772 SEQ ID NO: 23), AAVF5 (US20030138772 SEQ ID NO: 24), AAVH6 (US20030138772 SEQ ID NO: 25), AAVH2 (US20030138772 SEQ ID NO: 26), AAV42-8 (US20030138772 SEQ ID NO: 27), AAV42-15 (US20030138772 SEQ ID NO: 28), AAV42-5b (US20030138772 SEQ ID NO: 29), AAV42-1b (US20030138772 SEQ ID NO: 30), AAV42-13 (US20030138772 SEQ ID NO: 31), AAV42-3a (US20030138772 SEQ ID NO: 32), AAV42-4 (US20030138772 SEQ ID NO: 33), AAV42-5a (US20030138772 SEQ ID NO: 34), AAV42-10 (US20030138772 SEQ ID NO: 35), AAV42-3b (US20030138772 SEQ ID NO: 36), AAV42-11 (US20030138772 SEQ ID NO: 37), AAV42-6b (US20030138772 SEQ ID NO: 38), AAV43-1 (US20030138772 SEQ ID NO: 39), AAV43-5 (US20030138772 SEQ ID NO: 40), AAV43-12 (US20030138772 SEQ ID NO: 41), AAV43-20 (US20030138772 SEQ ID NO: 42), AAV43-21 (US20030138772 SEQ ID NO: 43), AAV43-23 (US20030138772 SEQ ID NO: 44), AAV43-25 (US20030138772 SEQ ID NO: 45), AAV44.1 (US20030138772 SEQ ID NO: 46), AAV44.5 (US20030138772 SEQ ID NO: 47), AAV223.1 (US20030138772 SEQ ID NO: 48), AAV223.2 (US20030138772 SEQ ID NO: 49), AAV223.4 (US20030138772 SEQ ID NO: 50), AAV223.5 (US20030138772 SEQ ID NO: 51), AAV223.6 (US20030138772 SEQ ID NO: 52), AAV223.7 (US20030138772 SEQ ID NO: 53), AAVA3.4 (US20030138772 SEQ ID NO: 54), AAVA3.5 (US20030138772 SEQ ID NO: 55), AAVA3.7 (US20030138772 SEQ ID NO: 56), AAVA3.3 (US20030138772 SEQ ID NO: 57), AAV42.12 (US20030138772 SEQ ID NO: 58), AAV44.2 (US20030138772 SEQ ID NO: 59), AAV42-2 (US20030138772 SEQ ID NO: 9), or variants thereof.

[0069] In some embodiments, the AAV serotype may be, or have, a sequence as described in United States Publication No. US20150159173, the contents of which are herein incorporated by reference in their entirety, such as, but not limited to, AAV2 (SEQ ID NO: 7 and 23 of US20150159173), rh20 (SEQ ID NO: 1 of US20150159173), rh32/33 (SEQ ID NO: 2 of US20150159173), rh39 (SEQ ID NO: 3, 20 and 36 of US20150159173), rh46 (SEQ ID NO: 4 and 22 of US20150159173), rh73 (SEQ ID NO: 5 of US20150159173), rh74 (SEQ ID NO: 6 of US20150159173), AAV6.1 (SEQ ID NO: 29 of US20150159173), rh.8 (SEQ ID NO: 41 of US20150159173), rh.48.1 (SEQ ID NO: 44 of US20150159173), hu.44 (SEQ ID NO: 45 of US20150159173), hu.29 (SEQ ID NO: 42 of US20150159173), hu.48 (SEQ ID NO: 38 of US20150159173), rh54 (SEQ ID NO: 49 of US20150159173), AAV2 (SEQ ID NO: 7 of US20150159173), cy.5 (SEQ ID NO: 8 and 24 of US20150159173), rh.10 (SEQ ID NO: 9 and 25 of US20150159173), rh.13 (SEQ ID NO: 10 and 26 of US20150159173), AAV1 (SEQ ID NO: 11 and 27 of US20150159173), AAV3 (SEQ ID NO: 12 and 28 of US20150159173), AAV6 (SEQ ID NO: 13 and 29 of US20150159173), AAV7 (SEQ ID NO: 14 and 30 of US20150159173), AAV8 (SEQ ID NO: 15 and 31 of US20150159173), hu.13 (SEQ ID NO: 16 and 32 of US20150159173), hu.26 (SEQ ID NO: 17 and 33 of US20150159173), hu.37 (SEQ ID NO: 18 and 34 of US20150159173), hu.53 (SEQ ID NO: 19 and 35 of US20150159173), rh.43 (SEQ ID NO: 21 and 37 of US20150159173), rh2 (SEQ ID NO: 39 of US20150159173), rh.37 (SEQ ID NO: 40 of US20150159173), rh.64 (SEQ ID NO: 43 of US20150159173), rh.48 (SEQ ID NO: 44 of US20150159173), ch.5 (SEQ ID NO 46 of US20150159173), rh.67 (SEQ ID NO: 47 of US20150159173), rh.58 (SEQ ID NO: 48 of US20150159173), or variants thereof including, but not limited to Cy5R1, Cy5R2, Cy5R3, Cy5R4, rh. 13R, rh.37R2, rh.2R, rh.8R, rh.48.1, rh.48.2, rh.48.1.2, hu.44R1, hu.44R2, hu.44R3, hu.29R, ch.5R1, rh64R1, rh64R2, AAV6.2, AAV6.1, AAV6.12, hu.48R1, hu.48R2, and hu.48R3.

[0070] In some embodiments, the AAV serotype may be, or have, a sequence as described in U.S. Pat. No. 7,198,951, the contents of which are herein incorporated by reference in their entirety, such as, but not limited to, AAV9 (SEQ ID NO: 1-3 of U.S. Pat. No. 7,198,951), AAV2 (SEQ ID NO: 4 of U.S. Pat. No. 7,198,951), AAV1 (SEQ ID NO: 5 of U.S. Pat. No. 7,198,951), AAV3 (SEQ ID NO: 6 of U.S. Pat. No. 7,198,951), and AAV8 (SEQ ID NO: 7 of U.S. Pat. No. 7,198,951).

[0071] In some embodiments, the AAV serotype may be, or have, a mutation in the AAV9 sequence as described by N Pulicherla et al. (Molecular Therapy 19(6): 1070-1078 (2011), herein incorporated by reference in its entirety), such as but not limited to, AAV9.9, AAV9.11, AAV9.13, AAV9.16, AAV9.24, AAV9.45, AAV9.47, AAV9.61, AAV9.68, AAV9.84.

[0072] In some embodiments, the AAV serotype may be, or have, a sequence as described in U.S. Pat. No. 6,156,303, the contents of which are herein incorporated by reference in their entirety, such as, but not limited to, AAV3B (SEQ ID NO: 1 and 10 of U.S. Pat. No. 6,156,303), AAV6 (SEQ ID NO: 2, 7 and 11 of U.S. Pat. No. 6,156,303), AAV2 (SEQ ID NO: 3 and 8 of U.S. Pat. No. 6,156,303), AAV3A (SEQ ID NO: 4 and 9, of U.S. Pat. No. 6,156,303), or derivatives thereof.

[0073] In some embodiments, the AAV serotype may be, or have, a sequence as described in United States Publication No. US20140359799, the contents of which are herein incorporated by reference in their entirety, such as, but not limited to, AAV8 (SEQ ID NO: 1 of US20140359799), AAVDJ (SEQ ID NO: 2 and 3 of US20140359799), or variants thereof.

[0074] In some embodiments, the serotype may be AAVDJ or a variant thereof, such as AAVDJ8 (or AAV-DJ8), as described by Grimm et al. (Journal of Virology 82(12): 5887-5911 (2008), herein incorporated by reference in its entirety). The amino acid sequence of AAVDJ8 may comprise two or more mutations in order to remove the heparin binding domain (HBD). As a non-limiting example, the AAV-DJ sequence described as SEQ ID NO: 1 in U.S. Pat. No. 7,588,772, the contents of which are herein incorporated by reference in their entirety, may comprise two mutations: (1) R587Q where arginine (R; Arg) at amino acid 587 is changed to glutamine (Q; Gln) and (2) R590T where arginine (R; Arg) at amino acid 590 is changed to threonine (T; Thr). As another non-limiting example, the AAVDJ sequence described as SEQ ID NO: 1 in U.S. Pat. No. 7,588,772 may comprise three mutations: (1) K406R where lysine (K; Lys) at amino acid 406 is changed to arginine (R; Arg), (2) R587Q where arginine (R; Arg) at amino acid 587 is changed to glutamine (Q; Gln) and (3) R590T where arginine (R; Arg) at amino acid 590 is changed to threonine (T; Thr).

[0075] In some embodiments, the AAV serotype may be, or have, a sequence of AAV4 as described in International Publication No. WO1998011244, the contents of which are herein incorporated by reference in their entirety, such as, but not limited to AAV4 (SEQ ID NO: 1-20 of WO1998011244).

[0076] In some embodiments, the AAV serotype may be, or have, a mutation in the AAV2 sequence to generate AAV2G9 as described in International Publication No. WO2014144229 and herein incorporated by reference in its entirety.

[0077] In some embodiments, the AAV serotype may be, or have, a sequence as described in International Publication No. WO2005033321, the contents of which are herein incorporated by reference in their entirety, such as, but not limited to AAV3-3 (SEQ ID NO: 217 of WO2005033321), AAV1 (SEQ ID NO: 219 and 202 of WO2005033321), AAV106.1/hu.37 (SEQ ID No: 10 of WO2005033321), AAV114.3/hu.40 (SEQ ID No: 11 of WO2005033321), AAV127.2/hu.41 (SEQ ID NO:6 and 8 of WO2005033321), AAV128.3/hu.44 (SEQ ID No: 81 of WO2005033321), AAV130.4/hu.48 (SEQ ID NO: 78 of WO2005033321), AAV145.1/hu.53 (SEQ ID No: 176 and 177 of WO2005033321), AAV145.6/hu.56 (SEQ ID NO: 168 and 192 of WO2005033321), AAV16.12/hu.11 (SEQ ID NO: 153 and 57 of WO2005033321), AAV16.8/hu.10 (SEQ ID NO: 156 and 56 of WO2005033321), AAV161.10/hu.60 (SEQ ID No: 170 of WO2005033321), AAV161.6/hu.61 (SEQ ID No: 174 of WO2005033321), AAV1-7/rh.48 (SEQ ID NO: 32 of WO2005033321), AAV1-8/rh.49 (SEQ ID NOs: 103 and 25 of WO2005033321), AAV2 (SEQ ID NO: 211 and 221 of WO2005033321), AAV2-15/rh.62 (SEQ ID No: 33 and 114 of WO2005033321), AAV2-3/rh.61 (SEQ ID NO: 21 of WO2005033321), AAV2-4/rh.50 (SEQ ID No: 23 and 108 of WO2005033321), AAV2-5/rh.51 (SEQ ID NO: 104 and 22 of WO2005033321), AAV3.1/hu.6 (SEQ ID NO: 5 and 84 of WO2005033321), AAV3.1/hu.9 (SEQ ID NO: 155 and 58 of WO2005033321), AAV3-11/rh.53 (SEQ ID NO: 186 and 176 of WO2005033321), AAV3-3 (SEQ ID NO: 200 of WO2005033321), AAV33.12/hu.17 (SEQ ID NO:4 of WO2005033321), AAV33.4/hu.15 (SEQ ID No: 50 of WO2005033321), AAV33.8/hu.16 (SEQ ID No: 51 of WO2005033321), AAV3-9/rh.52 (SEQ ID NO: 96 and 18 of WO2005033321), AAV4-19/rh.55 (SEQ ID NO: 117 of WO2005033321), AAV4-4 (SEQ ID NO: 201 and 218 of WO2005033321), AAV4-9/rh.54 (SEQ ID NO: 116 of WO2005033321), AAV5 (SEQ ID NO: 199 and 216 of WO2005033321), AAV52.1/hu.20 (SEQ ID NO: 63 of WO2005033321), AAV52/hu.19 (SEQ ID NO: 133 of WO2005033321), AAV5-22/rh.58 (SEQ ID No: 27 of WO2005033321), AAV5-3/rh.57 (SEQ ID NO: 105 of WO2005033321), AAV5-3/rh.57 (SEQ ID No: 26 of WO2005033321), AAV58.2/hu.25 (SEQ ID No: 49 of WO2005033321), AAV6 (SEQ ID NO: 203 and 220 of WO2005033321), AAV7 (SEQ ID NO: 222 and 213 of WO2005033321), AAV7.3/hu.7 (SEQ ID No: 55 of WO2005033321), AAV8 (SEQ ID NO: 223 and 214 of WO2005033321), AAVH-1/hu.1 (SEQ ID No: 46 of WO2005033321), AAVH-5/hu.3 (SEQ ID No: 44 of WO2005033321), AAVhu.1 (SEQ ID NO: 144 of WO2005033321), AAVhu.10 (SEQ ID NO: 156 of WO2005033321), AAVhu.11 (SEQ ID NO: 153 of WO2005033321), AAVhu.12 (WO2005033321 SEQ ID NO: 59), AAVhu.13 (SEQ ID NO: 129 of WO2005033321), AAVhu.14/AAV9 (SEQ ID NO: 123 and 3 of WO2005033321), AAVhu.15 (SEQ ID NO: 147 of WO2005033321), AAVhu.16 (SEQ ID NO: 148 of WO2005033321), AAVhu.17 (SEQ ID NO: 83 of WO2005033321), AAVhu.18 (SEQ ID NO: 149 of WO2005033321), AAVhu.19 (SEQ ID NO: 133 of WO2005033321), AAVhu.2 (SEQ ID NO: 143 of WO2005033321), AAVhu.20 (SEQ ID NO: 134 of WO2005033321), AAVhu.21 (SEQ ID NO: 135 of WO2005033321), AAVhu.22 (SEQ ID NO: 138 of WO2005033321), AAVhu.23.2 (SEQ ID NO: 137 of WO2005033321), AAVhu.24 (SEQ ID NO: 136 of WO2005033321), AAVhu.25 (SEQ ID NO: 146 of WO2005033321), AAVhu.27 (SEQ ID NO: 140 of WO2005033321), AAVhu.29 (SEQ ID NO: 132 of WO2005033321), AAVhu.3 (SEQ ID NO: 145 of WO2005033321), AAVhu.31 (SEQ ID NO: 121 of WO2005033321), AAVhu.32 (SEQ ID NO: 122 of WO2005033321), AAVhu.34 (SEQ ID NO: 125 of WO2005033321), AAVhu.35 (SEQ ID NO: 164 of WO2005033321), AAVhu.37 (SEQ ID NO: 88 of WO2005033321), AAVhu.39 (SEQ ID NO: 102 of WO2005033321), AAVhu.4 (SEQ ID NO: 141 of WO2005033321), AAVhu.40 (SEQ ID NO: 87 of WO2005033321), AAVhu.41 (SEQ ID NO: 91 of WO2005033321), AAVhu.42 (SEQ ID NO: 85 of WO2005033321), AAVhu.43 (SEQ ID NO: 160 of WO2005033321), AAVhu.44 (SEQ ID NO: 144 of WO2005033321), AAVhu.45 (SEQ ID NO: 127 of WO2005033321), AAVhu.46 (SEQ ID NO: 159 of WO2005033321), AAVhu.47 (SEQ ID NO: 128 of WO2005033321), AAVhu.48 (SEQ ID NO: 157 of WO2005033321), AAVhu.49 (SEQ ID NO: 189 of WO2005033321), AAVhu.51 (SEQ ID NO: 190 of WO2005033321), AAVhu.52 (SEQ ID NO: 191 of WO2005033321), AAVhu.53 (SEQ ID NO: 186 of WO2005033321), AAVhu.54 (SEQ ID NO: 188 of WO2005033321), AAVhu.55 (SEQ ID NO: 187 of WO2005033321), AAVhu.56 (SEQ ID NO: 192 of WO2005033321), AAVhu.57 (SEQ ID NO: 193 of WO2005033321), AAVhu.58 (SEQ ID NO: 194 of WO2005033321), AAVhu.6 (SEQ ID NO: 84 of WO2005033321), AAVhu.60 (SEQ ID NO: 184 of WO2005033321), AAVhu.61 (SEQ ID NO: 185 of WO2005033321), AAVhu.63 (SEQ ID NO: 195 of WO2005033321), AAVhu.64 (SEQ ID NO: 196 of WO2005033321), AAVhu.66 (SEQ ID NO: 197 of WO2005033321), AAVhu.67 (SEQ ID NO: 198 of WO2005033321), AAVhu.7 (SEQ ID NO: 150 of WO2005033321), AAVhu.8 (WO2005033321 SEQ ID NO: 12), AAVhu.9 (SEQ ID NO: 155 of WO2005033321), AAVLG-10/rh.40 (SEQ ID No: 14 of WO2005033321), AAVLG-4/rh.38 (SEQ ID NO: 86 of WO2005033321), AAVLG-4/rh.38 (SEQ ID No: 7 of WO2005033321), AAVN721-8/rh.43 (SEQ ID NO: 163 of WO2005033321), AAVN721-8/rh.43 (SEQ ID No: 43 of WO2005033321), AAVpi.1 (WO2005033321 SEQ ID NO: 28), AAVpi.2 (WO2005033321 SEQ ID NO: 30), AAVpi.3 (WO2005033321 SEQ ID NO: 29), AAVrh.38 (SEQ ID NO: 86 of WO2005033321), AAVrh.40 (SEQ ID NO: 92 of WO2005033321), AAVrh.43 (SEQ ID NO: 163 of WO2005033321), AAVrh.44 (WO2005033321 SEQ ID NO: 34), AAVrh.45 (WO2005033321 SEQ ID NO: 41), AAVrh.47 (WO2005033321 SEQ ID NO: 38), AAVrh.48 (SEQ ID NO: 115 of WO2005033321), AAVrh.49 (SEQ ID NO: 103 of WO2005033321), AAVrh.50 (SEQ ID NO: 108 of WO2005033321), AAVrh.51 (SEQ ID NO: 104 of WO2005033321), AAVrh.52 (SEQ ID NO: 96 of WO2005033321), AAVrh.53 (SEQ ID NO: 97 of WO2005033321), AAVrh.55 (WO2005033321 SEQ ID NO: 37), AAVrh.56 (SEQ ID NO: 152 of WO2005033321), AAVrh.57 (SEQ ID NO: 105 of WO2005033321), AAVrh.58 (SEQ ID NO: 106 of WO2005033321), AAVrh.59 (WO2005033321 SEQ ID NO: 42), AAVrh.60 (WO2005033321 SEQ ID NO: 31), AAVrh.61 (SEQ ID NO: 107 of WO2005033321), AAVrh.62 (SEQ ID NO: 114 of WO2005033321), AAVrh.64 (SEQ ID NO: 99 of WO2005033321), AAVrh.65 (WO2005033321 SEQ ID NO: 35), AAVrh.68 (WO2005033321 SEQ ID NO: 16), AAVrh.69 (WO2005033321 SEQ ID NO: 39), AAVrh.70 (WO2005033321 SEQ ID NO: 20), AAVrh.72 (WO2005033321 SEQ ID NO: 9), or variants thereof including, but not limited to, AAVcy.2, AAVcy.3, AAVcy.4, AAVcy.5, AAVcy.6, AAVrh.12, AAVrh.17, AAVrh.18, AAVrh.19, AAVrh.21, AAVrh.22, AAVrh.23, AAVrh.24, AAVrh.25, AAVrh.25/42 15, AAVrh.31, AAVrh.32, AAVrh.33, AAVrh.34, AAVrh.35, AAVrh.36, AAVrh.37, AAVrh14. Non limiting examples of variants include SEQ ID NO: 13, 15, 17, 19, 24, 36, 40, 45, 47, 48, 51-54, 60-62, 64-77, 79, 80, 82, 89, 90, 93-95, 98, 100, 101, 109-113, 118-120, 124, 126, 131, 139, 142, 151,154, 158, 161, 162, 165-183, 202, 204-212, 215, 219, 224-236, of WO2005033321, the contents of which are herein incorporated by reference in their entirety.

[0078] In some embodiments, the AAV serotype may be, or have, a sequence as described in International Publication No. WO2015168666, the contents of which are herein incorporated by reference in their entirety, such as, but not limited to, AAVrh8R (SEQ ID NO: 9 of WO2015168666), AAVrh8R A586R mutant (SEQ ID NO: 10 of WO2015168666), AAVrh8R R533A mutant (SEQ ID NO: 11 of WO2015168666), or variants thereof.

[0079] In some embodiments, the AAV serotype may be, or have, a sequence as described in U.S. Pat. No. 9,233,131, the contents of which are herein incorporated by reference in their entirety, such as, but not limited to, AAVhE1.1 (SEQ ID NO:44 of U.S. Pat. No. 9,233,131), AAVhEr1.5 (SEQ ID NO:45 of U.S. Pat. No. 9,233,131), AAVhER1.14 (SEQ ID NO:46 of U.S. Pat. No. 9,233,131), AAVhEr1.8 (SEQ ID NO:47 of U.S. Pat. No. 9,233,131), AAVhEr1.16 (SEQ ID NO:48 of U.S. Pat. No. 9,233,131), AAVhEr1.18 (SEQ ID NO:49 of U.S. Pat. No. 9,233,131), AAVhEr1.35 (SEQ ID NO:50 of U.S. Pat. No. 9,233,131), AAVhEr1.7 (SEQ ID NO:51 of U.S. Pat. No. 9,233,131), AAVhEr1.36 (SEQ ID NO:52 of U.S. Pat. No. 9,233,131), AAVhEr2.29 (SEQ ID NO:53 of US9233131), AAVhEr2.4 (SEQ ID NO:54 of US9233131), AAVhEr2.16 (SEQ ID NO:55 of U.S. Pat. No. 9,233,131), AAVhEr2.30 (SEQ ID NO:56 of U.S. Pat. No. 9,233,131), AAVhEr2.31 (SEQ ID NO:58 of US9233131), AAVhEr2.36 (SEQ ID NO:57 of US9233131), AAVhER1.23 (SEQ ID NO:53 of U.S. Pat. No. 9,233,131), AAVhEr3.1 (SEQ ID NO:59 of U.S. Pat. No. 9,233,131), AAV2.5T (SEQ ID NO:42 of U.S. Pat. No. 9,233,131), or variants thereof.

[0080] In some embodiments, the AAV serotype may be, or have, a sequence as described in United States Patent Publication No. US20150376607, the contents of which are herein incorporated by reference in their entirety, such as, but not limited to, AAV-PAEC (SEQ ID NO:1 of US20150376607), AAV-LK01 (SEQ ID NO:2 of US20150376607), AAV-LK02 (SEQ ID NO:3 of US20150376607), AAV-LK03 (SEQ ID NO:4 of US20150376607), AAV-LK04 (SEQ ID NO:5 of US20150376607), AAV-LK05 (SEQ ID NO:6 of US20150376607), AAV-LK06 (SEQ ID NO:7 of US20150376607), AAV-LK07 (SEQ ID NO:8 of US20150376607), AAV-LK08 (SEQ ID NO:9 of US20150376607), AAV-LK09 (SEQ ID NO:10 of US20150376607), AAV-LK10 (SEQ ID NO:11 of US20150376607), AAV-LK11 (SEQ ID NO:12 of US20150376607), AAV-LK12 (SEQ ID NO:13 of US20150376607), AAV-LK13 (SEQ ID NO:14 of US20150376607), AAV-LK14 (SEQ ID NO:15 of US20150376607), AAV-LK15 (SEQ ID NO:16 of US20150376607), AAV-LK16 (SEQ ID NO:17 of US20150376607), AAV-LK17 (SEQ ID NO:18 of US20150376607), AAV-LK18 (SEQ ID NO:19 of US20150376607), AAV-LK19 (SEQ ID NO:20 of US20150376607), AAV-PAEC2 (SEQ ID NO:21 of US20150376607), AAV-PAEC4 (SEQ ID NO:22 of US20150376607), AAV-PAEC6 (SEQ ID NO:23 of US20150376607), AAV-PAEC7 (SEQ ID NO:24 of US20150376607), AAV-PAEC8 (SEQ ID NO:25 of US20150376607), AAV-PAEC11 (SEQ ID NO:26 of US20150376607), AAV-PAEC12 (SEQ ID NO:27, of US20150376607), or variants thereof.

[0081] In some embodiments, the AAV serotype may be, or have, a sequence as described in U.S. Pat. No. 9,163,261, the contents of which are herein incorporated by reference in their entirety, such as, but not limited to, AAV-2-pre-miRNA-101 (SEQ ID NO: 1 U.S. Pat. No. 9,163,261), or variants thereof.

[0082] In some embodiments, the AAV serotype may be, or have, a sequence as described in United States Patent Publication No. US20150376240, the contents of which are herein incorporated by reference in their entirety, such as, but not limited to, AAV-8h (SEQ ID NO: 6 of US20150376240), AAV-8b (SEQ ID NO: 5 of US20150376240), AAV-h (SEQ ID NO: 2 of US20150376240), AAV-b (SEQ ID NO: 1 of US20150376240), or variants thereof.

[0083] In some embodiments, the AAV serotype may be, or have, a sequence as described in United States Patent Publication No. US20160017295, the contents of which are herein incorporated by reference in their entirety, such as, but not limited to, AAV SM 10-2 (SEQ ID NO: 22 of US20160017295), AAV Shuffle 100-1 (SEQ ID NO: 23 of US20160017295), AAV Shuffle 100-3 (SEQ ID NO: 24 of US20160017295), AAV Shuffle 100-7 (SEQ ID NO: 25 of US20160017295), AAV Shuffle 10-2 (SEQ ID NO: 34 of US20160017295), AAV Shuffle 10-6 (SEQ ID NO: 35 of US20160017295), AAV Shuffle 10-8 (SEQ ID NO: 36 of US20160017295), AAV Shuffle 100-2 (SEQ ID NO: 37 of US20160017295), AAV SM 10-1 (SEQ ID NO: 38 of US20160017295), AAV SM 10-8 (SEQ ID NO: 39 of US20160017295), AAV SM 100-3 (SEQ ID NO: 40 of US20160017295), AAV SM 100-10 (SEQ ID NO: 41 of US20160017295), or variants thereof.

[0084] In some embodiments, the AAV serotype may be, or have, a sequence as described in United States Patent Publication No. US20150238550, the contents of which are herein incorporated by reference in their entirety, such as, but not limited to, BNP61 AAV (SEQ ID NO: 1 of US20150238550), BNP62 AAV (SEQ ID NO: 3 of US20150238550), BNP63 AAV (SEQ ID NO: 4 of US20150238550), or variants thereof.

[0085] In some embodiments, the AAV serotype may be or may have a sequence as described in United States Patent Publication No. US20150315612, the contents of which are herein incorporated by reference in their entirety, such as, but not limited to, AAVrh.50 (SEQ ID NO: 108 of US20150315612), AAVrh.43 (SEQ ID NO: 163 of US20150315612), AAVrh.62 (SEQ ID NO: 114 of US20150315612), AAVrh.48 (SEQ ID NO: 115 of US20150315612), AAVhu.19 (SEQ ID NO: 133 of US20150315612), AAVhu.11 (SEQ ID NO: 153 of US20150315612), AAVhu.53 (SEQ ID NO: 186 of US20150315612), AAV4-8/rh.64 (SEQ ID No: 15 of US20150315612), AAVLG-9/hu.39 (SEQ ID No: 24 of US20150315612), AAV54.5/hu.23 (SEQ ID No: 60 of US20150315612), AAV54.2/hu.22 (SEQ ID No: 67 of US20150315612), AAV54.7/hu.24 (SEQ ID No: 66 of US20150315612), AAV54.1/hu.21 (SEQ ID No: 65 of US20150315612), AAV54.4R/hu.27 (SEQ ID No: 64 of US20150315612), AAV46.2/hu.28 (SEQ ID No: 68 of US20150315612), AAV46.6/hu.29 (SEQ ID No: 69 of US20150315612), AAV128.1/hu.43 (SEQ ID No: 80 of US20150315612), or variants thereof.

[0086] In some embodiments, the AAV serotype may be, or have, a sequence as described in International Publication No. WO2015121501, the contents of which are herein incorporated by reference in their entirety, such as, but not limited to, true type AAV (ttAAV) (SEQ ID NO: 2 of WO2015121501), “UPenn AAV10” (SEQ ID NO: 8 of WO2015121501), “Japanese AAV10” (SEQ ID NO: 9 of WO2015121501), or variants thereof.

[0087] In one embodiment, the AAV serotype may be an avian AAV (AAAV). The AAAV serotype may be, or have, a sequence as described in U.S. Pat. No. 9,238,800, the contents of which are herein incorporated by reference in their entirety, such as, but not limited to, AAAV (SEQ ID NO: 1, 2, 4, 6, 8, 10, 12, and 14 of U.S. Pat. No. 9,238,800), or variants thereof.

[0088] In one embodiment, the AAV serotype may be a bovine AAV (BAAV). The BAAV serotype may be, or have, a sequence as described in U.S. Pat. No. 9,193,769, the contents of which are herein incorporated by reference in their entirety, such as, but not limited to, BAAV (SEQ ID NO: 1 and 6 of U.S. Pat. No. 9,193,769), or variants thereof. The BAAV serotype may be or have a sequence as described in U.S. Pat. No. 7,427,396, the contents of which are herein incorporated by reference in their entirety, such as, but not limited to, BAAV (SEQ ID NO: 5 and 6 of US7427396), or variants thereof.

[0089] In one embodiment, the AAV serotype may be a caprine AAV. The caprine AAV serotype may be, or have, a sequence as described in U.S. Pat. No. 7,427,396, the contents of which are herein incorporated by reference in their entirety, such as, but not limited to, caprine AAV (SEQ ID NO: 3 of US7427396), or variants thereof.

[0090] In other embodiments the AAV serotype may be engineered as a hybrid AAV from two or more parental serotypes. In one embodiment, the AAV may be AAV2G9 which comprises sequences from AAV2 and AAV9. The AAV2G9 AAV serotype may be, or have, a sequence as described in United States Patent Publication No. US20160017005, the contents of which are herein incorporated by reference in their entirety.

[0091] In one embodiment, the AAV serotype may be a serotype generated by the AAV9 capsid library with mutations in amino acids 390-627 (VP1 numbering) as described by Pulicherla et al. (Molecular Therapy 19(6): 1070-1078 (2011), the contents of which are herein incorporated by reference in their entirety. The serotype and corresponding nucleotide and amino acid substitutions may be, but is not limited to, AAV9.1 (G1594C; D532H), AAV6.2 (T1418A and T1436X; V473D and I479K), AAV9.3 (T1238A; F413Y), AAV9.4 (T1250C and A1617T; F417S), AAV9.5 (A1235G, A1314T, A1642G, C1760T; Q412R, T548A, A587V), AAV9.6 (T1231A; F411I), AAV9.9 (G1203A, G1785T; W595C), AAV9.10 (A1500G, T1676C; M559T), AAV9.11 (A1425T, A1702C, A1769T; T568P, Q590L), AAV9.13 (A1369C, A1720T; N457H, T574S), AAV9.14 (T1340A, T1362C, T1560C, G1713A; L447H), AAV9.16 (A1775T; Q592L), AAV9.24 (T1507C, T1521G; W503R), AAV9.26 (A1337G, A1769C; Y446C, Q590P), AAV9.33 (A1667C; D556A), AAV9.34 (A1534G, C1794T; N512D), AAV9.35 (A1289T, T1450A, C1494T, A1515T, C1794A, G1816A; Q430L, Y484N, N98K, V606I), AAV9.40 (A1694T, E565V), AAV9.41 (A1348T, T1362C; T450S), AAV9.44 (A1684C, A1701T, A1737G; N562H, K567N), AAV9.45 (A1492T, C1804T; N498Y, L602F), AAV9.46 (G1441C, T1525C, T1549G; G481R, W509R, L517V), 9.47 (G1241A, G1358A, A1669G, C1745T; S414N, G453D, K557E, T582I), AAV9.48 (C1445T, A1736T; P482L, Q579L), AAV9.50 (A1638T, C1683T, T1805A; Q546H, L602H), AAV9.53 (G1301A, A1405C, C1664T, G1811T; R134Q, S469R, A555V, G604V), AAV9.54 (C1531A, T1609A; L511I, L537M), AAV9.55 (T1605A; F535L), AAV9.58 (C1475T, C1579A; T492I, H527N), AAV.59 (T1336C; Y446H), AAV9.61 (A1493T; N498I), AAV9.64 (C1531A, A1617T; L511I), AAV9.65 (C1335T, T1530C, C1568A; A523D), AAV9.68 (C1510A; P504T), AAV9.80 (G1441A; G481R), AAV9.83 (C1402A, A1500T; P468T, E500D), AAV9.87 (T1464C, T1468C; S490P), AAV9.90 (A1196T; Y399F), AAV9.91 (T1316G, A1583T, C1782G, T1806C; L439R, K528I), AAV9.93 (A1273G, A1421G, A1638C, C1712T, G1732A, A1744T, A1832T; S425G, Q474R, Q546H, P571L, G578R, T582S, D611V), AAV9.94 (A1675T; M559L) and AAV9.95 (T1605A; F535L).

[0092] In some embodiments, the AAV serotype may be, or have, a sequence as described in International Publication No. WO2016049230, the contents of which are herein incorporated by reference in their entirety, such as, but not limited to AAVF1/HSC1 (SEQ ID NO: 2 and 20 of WO2016049230), AAVF2/HSC2 (SEQ ID NO: 3 and 21 of WO2016049230), AAVF3/HSC3 (SEQ ID NO: 5 and 22 of WO2016049230), AAVF4/HSC4 (SEQ ID NO: 6 and 23 of WO2016049230), AAVF5/HSC5 (SEQ ID NO: 11 and 25 of WO2016049230), AAVF6/HSC6 (SEQ ID NO: 7 and 24 of WO2016049230), AAVF7/HSC7 (SEQ ID NO: 8 and 27 of WO2016049230), AAVF8/HSC8 (SEQ ID NO: 9 and 28 of WO2016049230), AAVF9/HSC9 (SEQ ID NO: 10 and 29 of WO2016049230), AAVF11/HSC11 (SEQ ID NO: 4 and 26 of WO2016049230), AAVF12/HSC12 (SEQ ID NO: 12 and 30 of WO2016049230), AAVF13/HSC13 (SEQ ID NO: 14 and 31 of WO2016049230), AAVF14/HSC14 (SEQ ID NO: 15 and 32 of WO2016049230), AAVF15/HSC15 (SEQ ID NO: 16 and 33 of WO2016049230), AAVF16/HSC16 (SEQ ID NO: 17 and 34 of WO2016049230), AAVF17/HSC17 (SEQ ID NO: 13 and 35 of WO2016049230), or variants or derivatives thereof.

[0093] In some embodiments, the AAV serotype may be, or have, a sequence as described in U.S. Pat. No. 8,734,809, the contents of which are herein incorporated by reference in their entirety, such as, but not limited to, AAV CBr-E1 (SEQ ID NO: 13 and 87 of U.S. Pat. No. 8,734,809), AAV CBr-E2 (SEQ ID NO: 14 and 88 of U.S. Pat. No. 8,734,809), AAV CBr-E3 (SEQ ID NO: 15 and 89 of U.S. Pat. No. 8,734,809), AAV CBr-E4 (SEQ ID NO: 16 and 90 of U.S. Pat. No. 8,734,809), AAV CBr-E5 (SEQ ID NO: 17 and 91 of U.S. Pat. No. 8,734,809), AAV CBr-e5 (SEQ ID NO: 18 and 92 of U.S. Pat. No. 8,734,809), AAV CBr-E6 (SEQ ID NO: 19 and 93 of U.S. Pat. No. 8,734,809), AAV CBr-E7 (SEQ ID NO: 20 and 94 of U.S. Pat. No. 8,734,809), AAV CBr-E8 (SEQ ID NO: 21 and 95 of U.S. Pat. No. 8,734,809), AAV CLv-D1 (SEQ ID NO: 22 and 96 of U.S. Pat. No. 8,734,809), AAV CLv-D2 (SEQ ID NO: 23 and 97 of U.S. Pat. No. 8,734,809), AAV CLv-D3 (SEQ ID NO: 24 and 98 of U.S. Pat. No. 8,734,809), AAV CLv-D4 (SEQ ID NO: 25 and 99 of U.S. Pat. No. 8,734,809), AAV CLv-D5 (SEQ ID NO: 26 and 100 of U.S. Pat. No. 8,734,809), AAV CLv-D6 (SEQ ID NO: 27 and 101 of U.S. Pat. No. 8,734,809), AAV CLv-D7 (SEQ ID NO: 28 and 102 of U.S. Pat. No. 8,734,809), AAV CLv-D8 (SEQ ID NO: 29 and 103 of U.S. Pat. No. 8,734,809), AAV CLv-E1 (SEQ ID NO: 13 and 87 of U.S. Pat. No. 8,734,809), AAV CLv-R1 (SEQ ID NO: 30 and 104 of U.S. Pat. No. 8,734,809), AAV CLv-R2 (SEQ ID NO: 31 and 105 of U.S. Pat. No. 8,734,809), AAV CLv-R3 (SEQ ID NO: 32 and 106 of U.S. Pat. No. 8,734,809), AAV CLv-R4 (SEQ ID NO: 33 and 107 of U.S. Pat. No. 8,734,809), AAV CLv-R5 (SEQ ID NO: 34 and 108 of U.S. Pat. No. 8,734,809), AAV CLv-R6 (SEQ ID NO: 35 and 109 of U.S. Pat. No. 8,734,809), AAV CLv-R7 (SEQ ID NO: 36 and 110 of U.S. Pat. No. 8,734,809), AAV CLv-R8 (SEQ ID NO: X and X of U.S. Pat. No. 8,734,809), AAV CLv-R9 (SEQ ID NO: X and X of U.S. Pat. No. 8,734,809), AAV CLg-F1 (SEQ ID NO: 39 and 113 of U.S. Pat. No. 8,734,809), AAV CLg-F2 (SEQ ID NO: 40 and 114 of U.S. Pat. No. 8,734,809), AAV CLg-F3 (SEQ ID NO: 41 and 115 of U.S. Pat. No. 8,734,809), AAV CLg-F4 (SEQ ID NO: 42 and 116 of U.S. Pat. No. 8,734,809), AAV CLg-F5 (SEQ ID NO: 43 and 117 of U.S. Pat. No. 8,734,809), AAV CLg-F6 (SEQ ID NO: 43 and 117 of U.S. Pat. No. 8,734,809), AAV CLg-F7 (SEQ ID NO: 44 and 118 of U.S. Pat. No. 8,734,809), AAV CLg-F8 (SEQ ID NO: 43 and 117 of U.S. Pat. No. 8,734,809), AAV CSp-1 (SEQ ID NO: 45 and 119 of U.S. Pat. No. 8,734,809), AAV CSp-10 (SEQ ID NO: 46 and 120 of U.S. Pat. No. 8,734,809), AAV CSp-11 (SEQ ID NO: 47 and 121 of U.S. Pat. No. 8,734,809), AAV CSp-2 (SEQ ID NO: 48 and 122 of U.S. Pat. No. 8,734,809), AAV CSp-3 (SEQ ID NO: 49 and 123 of U.S. Pat. No. 8,734,809), AAV CSp-4 (SEQ ID NO: 50 and 124 of U.S. Pat. No. 8,734,809), AAV CSp-6 (SEQ ID NO: 51 and 125 of U.S. Pat. No. 8,734,809), AAV CSp-7 (SEQ ID NO: 52 and 126 of U.S. Pat. No. 8,734,809), AAV CSp-8 (SEQ ID NO: 53 and 127 of U.S. Pat. No. 8,734,809), AAV CSp-9 (SEQ ID NO: 54 and 128 of U.S. Pat. No. 8,734,809), AAV CHt-2 (SEQ ID NO: 55 and 129 of U.S. Pat. No. 8,734,809), AAV CHt-3 (SEQ ID NO: 56 and 130 of U.S. Pat. No. 8,734,809), AAV CKd-1 (SEQ ID NO: 57 and 131 of U.S. Pat. No. 8,734,809), AAV CKd-10 (SEQ ID NO: 58 and 132 of U.S. Pat. No. 8,734,809), AAV CKd-2 (SEQ ID NO: 59 and 133 of U.S. Pat. No. 8,734,809), AAV CKd-3 (SEQ ID NO: 60 and 134 of U.S. Pat. No. 8,734,809), AAV CKd-4 (SEQ ID NO: 61 and 135 of U.S. Pat. No. 8,734,809), AAV CKd-6 (SEQ ID NO: 62 and 136 of U.S. Pat. No. 8,734,809), AAV CKd-7 (SEQ ID NO: 63 and 137 of U.S. Pat. No. 8,734,809), AAV CKd-8 (SEQ ID NO: 64 and 138 of U.S. Pat. No. 8,734,809), AAV CLv-1 (SEQ ID NO: 35 and 139 of U.S. Pat. No. 8,734,809), AAV CLv-12 (SEQ ID NO: 66 and 140 of U.S. Pat. No. 8,734,809), AAV CLv-13 (SEQ ID NO: 67 and 141 of U.S. Pat. No. 8,734,809), AAV CLv-2 (SEQ ID NO: 68 and 142 of U.S. Pat. No. 8,734,809), AAV CLv-3 (SEQ ID NO: 69 and 143 of U.S. Pat. No. 8,734,809), AAV CLv-4 (SEQ ID NO: 70 and 144 of U.S. Pat. No. 8,734,809), AAV CLv-6 (SEQ ID NO: 71 and 145 of U.S. Pat. No. 8,734,809), AAV CLv-8 (SEQ ID NO: 72 and 146 of U.S. Pat. No. 8,734,809), AAV CKd-B1 (SEQ ID NO: 73 and 147 of U.S. Pat. No. 8,734,809), AAV CKd-B2 (SEQ ID NO: 74 and 148 of U.S. Pat. No. 8,734,809), AAV CKd-B3 (SEQ ID NO: 75 and 149 of U.S. Pat. No. 8,734,809), AAV CKd-B4 (SEQ ID NO: 76 and 150 of U.S. Pat. No. 8,734,809), AAV CKd-B5 (SEQ ID NO: 77 and 151 of U.S. Pat. No. 8,734,809), AAV CKd-B6 (SEQ ID NO: 78 and 152 of U.S. Pat. No. 8,734,809), AAV CKd-B7 (SEQ ID NO: 79 and 153 of U.S. Pat. No. 8,734,809), AAV CKd-B8 (SEQ ID NO: 80 and 154 of U.S. Pat. No. 8,734,809), AAV CKd-H1 (SEQ ID NO: 81 and 155 of U.S. Pat. No. 8,734,809), AAV CKd-H2 (SEQ ID NO: 82 and 156 of U.S. Pat. No. 8,734,809), AAV CKd-H3 (SEQ ID NO: 83 and 157 of U.S. Pat. No. 8,734,809), AAV CKd-H4 (SEQ ID NO: 84 and 158 of U.S. Pat. No. 8,734,809), AAV CKd-H5 (SEQ ID NO: 85 and 159 of U.S. Pat. No. 8,734,809), AAV CKd-H6 (SEQ ID NO: 77 and 151 of U.S. Pat. No. 8,734,809), AAV CHt-1 (SEQ ID NO: 86 and 160 of U.S. Pat. No. 8,734,809), AAV CLv1-1 (SEQ ID NO: 171 of U.S. Pat. No. 8,734,809), AAV CLv1-2 (SEQ ID NO: 172 of U.S. Pat. No. 8,734,809), AAV CLv1-3 (SEQ ID NO: 173 of U.S. Pat. No. 8,734,809), AAV CLv1-4 (SEQ ID NO: 174 of U.S. Pat. No. 8,734,809), AAV Clv1-7 (SEQ ID NO: 175 of U.S. Pat. No. 8,734,809), AAV Clv1-8 (SEQ ID NO: 176 of U.S. Pat. No. 8,734,809), AAV Clv1-9 (SEQ ID NO: 177 of U.S. Pat. No. 8,734,809), AAV Clv1-10 (SEQ ID NO: 178 of U.S. Pat. No. 8,734,809), AAV.VR-355 (SEQ ID NO: 181 of U.S. Pat. No. 8,734,809), AAV.hu.48R3 (SEQ ID NO: 183 of U.S. Pat. No. 8,734,809), or variants or derivatives thereof.

[0094] In some embodiments, the AAV serotype may be, or have, a sequence as described in International Publication No. WO2016065001, the contents of which are herein incorporated by reference in their entirety, such as, but not limited to AAV CHt-P2 (SEQ ID NO: 1 and 51 of WO2016065001), AAV CHt-P5 (SEQ ID NO: 2 and 52 of WO2016065001), AAV CHt-P9 (SEQ ID NO: 3 and 53 of WO2016065001), AAV CBr-7.1 (SEQ ID NO: 4 and 54 of WO2016065001), AAV CBr-7.2 (SEQ ID NO: 5 and 55 of WO2016065001), AAV CBr-7.3 (SEQ ID NO: 6 and 56 of WO2016065001), AAV CBr-7.4 (SEQ ID NO: 7 and 57 of WO2016065001), AAV CBr-7.5 (SEQ ID NO: 8 and 58 of WO2016065001), AAV CBr-7.7 (SEQ ID NO: 9 and 59 of WO2016065001), AAV CBr-7.8 (SEQ ID NO: 10 and 60 of WO2016065001), AAV CBr-7.10 (SEQ ID NO: 11 and 61 of WO2016065001), AAV CKd-N3 (SEQ ID NO: 12 and 62 of WO2016065001), AAV CKd-N4 (SEQ ID NO: 13 and 63 of WO2016065001), AAV CKd-N9 (SEQ ID NO: 14 and 64 of WO2016065001), AAV CLv-L4 (SEQ ID NO: 15 and 65 of WO2016065001), AAV CLv-L5 (SEQ ID NO: 16 and 66 of WO2016065001), AAV CLv-L6 (SEQ ID NO: 17 and 67 of WO2016065001), AAV CLv-K1 (SEQ ID NO: 18 and 68 of WO2016065001), AAV CLv-K3 (SEQ ID NO: 19 and 69 of WO2016065001), AAV CLv-K6 (SEQ ID NO: 20 and 70 of WO2016065001), AAV CLv-M1 (SEQ ID NO: 21 and 71 of WO2016065001), AAV CLv-M11 (SEQ ID NO: 22 and 72 of WO2016065001), AAV CLv-M2 (SEQ ID NO: 23 and 73 of WO2016065001), AAV CLv-M5 (SEQ ID NO: 24 and 74 of WO2016065001), AAV CLv-M6 (SEQ ID NO: 25 and 75 of WO2016065001), AAV CLv-M7 (SEQ ID NO: 26 and 76 of WO2016065001), AAV CLv-M8 (SEQ ID NO: 27 and 77 of WO2016065001), AAV CLv-M9 (SEQ ID NO: 28 and 78 of WO2016065001), AAV CHt-P1 (SEQ ID NO: 29 and 79 of WO2016065001), AAV CHt-P6 (SEQ ID NO: 30 and 80 of WO2016065001), AAV CHt-P8 (SEQ ID NO: 31 and 81 of WO2016065001), AAV CHt-6.1 (SEQ ID NO: 32 and 82 of WO2016065001), AAV CHt-6.10 (SEQ ID NO: 33 and 83 of WO2016065001), AAV CHt-6.5 (SEQ ID NO: 34 and 84 of WO2016065001), AAV CHt-6.6 (SEQ ID NO: 35 and 85 of WO2016065001), AAV CHt-6.7 (SEQ ID NO: 36 and 86 of WO2016065001), AAV CHt-6.8 (SEQ ID NO: 37 and 87 of WO2016065001), AAV CSp-8.10 (SEQ ID NO: 38 and 88 of WO2016065001), AAV CSp-8.2 (SEQ ID NO: 39 and 89 of WO2016065001), AAV CSp-8.4 (SEQ ID NO: 40 and 90 of WO2016065001), AAV CSp-8.5 (SEQ ID NO: 41 and 91 of WO2016065001), AAV CSp-8.6 (SEQ ID NO: 42 and 92 of WO2016065001), AAV CSp-8.7 (SEQ ID NO: 43 and 93 of WO2016065001), AAV CSp-8.8 (SEQ ID NO: 44 and 94 of WO2016065001), AAV CSp-8.9 (SEQ ID NO: 45 and 95 of WO2016065001), AAV CBr-B7.3 (SEQ ID NO: 46 and 96 of WO2016065001), AAV CBr-B7.4 (SEQ ID NO: 47 and 97 of WO2016065001), AAV3B (SEQ ID NO: 48 and 98 of WO2016065001), AAV4 (SEQ ID NO: 49 and 99 of WO2016065001), AAV5 (SEQ ID NO: 50 and 100 of WO2016065001), or variants or derivatives thereof.

[0095] In one embodiment, the AAV particle may utilize or be based on a serotype comprising at least one AAV capsid CD8+ T-cell epitope. As a non-limiting example, the serotype may be AAV1, AAV2 or AAV8.

[0096] In one embodiment the AAV serotype may comprise an AAV9 capsid with a tyrosine to phenylalanine substitution at position 446 of the AAV9 capsid protein sequence, as described in Lee, N.C., et al., 2015 Benefits of neuronal preferential systemic gene therapy for neurotransmitter deficiency. Mol. Ther. Vol. 23(10), 1572-1581, the contents of which are herein incorporated by reference in their entirety.

[0097] In one embodiment, the AAV particle of the present invention may be an AAV2/9, wherein the ITRs are derived from AAV2 and the capsid from AAV9.

[0098] In one embodiment, the AAV particle of the present invention may be an AAV3/9, wherein the ITRs are derived from AAV3 and the capsid from AAV9.

[0099] The AAV particle of the present invention may comprise any combination of ITR and capsid to generate a pseudotyped virus.

[0100] In one embodiment, the AAV particle may utilize or be based on a serotype selected from any of those found in Table 1.

[0101] In one embodiment, the AAV particle may be generated as a hybrid or pseudotyped AAV from two or more serotypes described in Table 1. As a non-limiting example, the ITRs may be from a first serotype in Table 1 and the capsid may be from a second serotype in Table 1.

[0102] In one embodiment, the AAV particle may utilize or be based on a sequence, fragment or variant thereof, of the sequences in Table 1.

[0103] In one embodiment, the AAV particle may utilize or be based on a sequence, fragment or variant as described in Table 1.

TABLE 1
AAV Serotypes

| Serotype | SEQ ID NO | Reference Information |
|---|---|---|
| AAV1 | 25 | US20150159173 SEQ ID NO: 11, US20150315612 SEQ |
| | | ID NO: 202 |
| AAV1 | 26 | US20160017295 SEQ ID NO: 1, US20030138772 SEQ |
| | | ID NO: 64, US20150159173 SEQ ID NO: 27, |
| | | US20150315612 SEQ ID NO: 219, U.S. Pat. No. 7,198,951 SEQ ID |
| | | NO: 5 |
| AAV1 | 27 | US20030138772 SEQ ID NO: 6 |
| AAV1.3 | 28 | US20030138772 SEQ ID NO: 14 |
| AAV10 | 29 | US20030138772 SEQ ID NO: 117 |
| AAV10 | 30 | WO2015121501 SEQ ID NO: 9 |
| AAV10 | 31 | WO2015121501 SEQ ID NO: 8 |
| AAV11 | 32 | US20030138772 SEQ ID NO: 118 |
| AAV12 | 33 | US20030138772 SEQ ID NO: 119 |
| AAV2 | 34 | US20150159173 SEQ ID NO: 7, US20150315612 SEQ |
| | | ID NO: 211 |
| AAV2 | 35 | US20030138772 SEQ ID NO: 70, US20150159173 SEQ |
| | | ID NO: 23, US20150315612 SEQ ID NO: 221, |
| | | US20160017295 SEQ ID NO: 2, U.S. Pat. No. 6,156,303 SEQ ID |
| | | NO: 4, U.S. Pat. No. 7,198,951 SEQ ID NO: 4, WO2015121501 |
| | | SEQ ID NO: 1 |
| AAV2 | 36 | U.S. Pat. No. 6,156,303 SEQ ID NO: 8 |
| AAV2 | 37 | US20030138772 SEQ ID NO: 7 |
| AAV2 | 38 | U.S. Pat. No. 6,156,303 SEQ ID NO: 3 |
| AAV2.5T | 39 | U.S. Pat. No. 9,233,131 SEQ ID NO: 42 |
| AAV223.10 | 40 | US20030138772 SEQ ID NO: 75 |
| AAV223.2 | 41 | US20030138772 SEQ ID NO: 49 |
| AAV223.2 | 42 | US20030138772 SEQ ID NO: 76 |
| AAV223.4 | 43 | US20030138772 SEQ ID NO: 50 |
| AAV223.4 | 44 | US20030138772 SEQ ID NO: 73 |
| AAV223.5 | 45 | US20030138772 SEQ ID NO: 51 |
| AAV223.5 | 46 | US20030138772 SEQ ID NO: 74 |
| AAV223.6 | 47 | US20030138772 SEQ ID NO: 52 |
| AAV223.6 | 48 | US20030138772 SEQ ID NO: 78 |
| AAV223.7 | 49 | US20030138772 SEQ ID NO: 53 |
| AAV223.7 | 50 | US20030138772 SEQ ID NO: 77 |
| AAV29.3 | 51 | US20030138772 SEQ ID NO: 82 |
| AAV29.4 | 52 | US20030138772 SEQ ID NO: 12 |
| AAV29.5 | 53 | US20030138772 SEQ ID NO: 83 |
| AAV29.5 (AAVbb.2) | 54 | US20030138772 SEQ ID NO: 13 |
| AAV3 | 55 | US20150159173 SEQ ID NO: 12 |
| AAV3 | 56 | US20030138772 SEQ ID NO: 71, US20150159173 SEQ |
| | | ID NO: 28, US20160017295 SEQ ID NO: 3, |
| | | U.S. Pat. No. 7,198,951 SEQ ID NO: 6 |
| AAV3 | 57 | US20030138772 SEQ ID NO: 8 |
| AAV3.3b | 58 | US20030138772 SEQ ID NO: 72 |
| AAV3-3 | 59 | US20150315612 SEQ ID NO: 200 |
| AAV3-3 | 60 | US20150315612 SEQ ID NO: 217 |
| AAV3a | 61 | U.S. Pat. No. 6,156,303 SEQ ID NO: 5 |
| AAV3a | 62 | U.S. Pat. No. 6,156,303 SEQ ID NO: 9 |
| AAV3b | 63 | U.S. Pat. No. 6,156,303 SEQ ID NO: 6 |
| AAV3b | 64 | U.S. Pat. No. 6,156,303 SEQ ID NO: 10 |
| AAV3b | 65 | U.S. Pat. No. 6,156,303 SEQ ID NO: 1 |
| AAV4 | 66 | US20140348794 SEQ ID NO: 17 |
| AAV4 | 67 | US20140348794 SEQ ID NO: 5 |
| AAV4 | 68 | US20140348794 SEQ ID NO: 3 |
| AAV4 | 69 | US20140348794 SEQ ID NO: 14 |
| AAV4 | 70 | US20140348794 SEQ ID NO: 15 |
| AAV4 | 71 | US20140348794 SEQ ID NO: 19 |
| AAV4 | 72 | US20140348794 SEQ ID NO: 12 |
| AAV4 | 73 | US20140348794 SEQ ID NO: 13 |
| AAV4 | 74 | US20140348794 SEQ ID NO: 7 |
| AAV4 | 75 | US20140348794 SEQ ID NO: 8 |
| AAV4 | 76 | US20140348794 SEQ ID NO: 9 |
| AAV4 | 77 | US20140348794 SEQ ID NO: 2 |
| AAV4 | 78 | US20140348794 SEQ ID NO: 10 |
| AAV4 | 79 | US20140348794 SEQ ID NO: 11 |
| AAV4 | 80 | US20140348794 SEQ ID NO: 18 |
| AAV4 | 81 | US20030138772 SEQ ID NO: 63, US20160017295 SEQ |
| | | ID NO: 4, US20140348794 SEQ ID NO: 4 |
| AAV4 | 82 | US20140348794 SEQ ID NO: 16 |
| AAV4 | 83 | US20140348794 SEQ ID NO: 20 |
| AAV4 | 84 | US20140348794 SEQ ID NO: 6 |
| AAV4 | 85 | US20140348794 SEQ ID NO: 1 |
| AAV42.2 | 86 | US20030138772 SEQ ID NO: 9 |
| AAV42.2 | 87 | US20030138772 SEQ ID NO: 102 |
| AAV42.3b | 88 | US20030138772 SEQ ID NO: 36 |
| AAV42.3B | 89 | US20030138772 SEQ ID NO: 107 |
| AAV42.4 | 90 | US20030138772 SEQ ID NO: 33 |
| AAV42.4 | 91 | US20030138772 SEQ ID NO: 88 |
| AAV42.8 | 92 | US20030138772 SEQ ID NO: 27 |
| AAV42.8 | 93 | US20030138772 SEQ ID NO: 85 |
| AAV43.1 | 94 | US20030138772 SEQ ID NO: 39 |
| AAV43.1 | 95 | US20030138772 SEQ ID NO: 92 |
| AAV43.12 | 96 | US20030138772 SEQ ID NO: 41 |
| AAV43.12 | 97 | US20030138772 SEQ ID NO: 93 |
| AAV43.20 | 98 | US20030138772 SEQ ID NO: 42 |
| AAV43.20 | 99 | US20030138772 SEQ ID NO: 99 |
| AAV43.21 | 100 | US20030138772 SEQ ID NO: 43 |
| AAV43.21 | 101 | US20030138772 SEQ ID NO: 96 |
| AAV43.23 | 102 | US20030138772 SEQ ID NO: 44 |
| AAV43.23 | 103 | US20030138772 SEQ ID NO: 98 |
| AAV43.25 | 104 | US20030138772 SEQ ID NO: 45 |
| AAV43.25 | 105 | US20030138772 SEQ ID NO: 97 |
| AAV43.5 | 106 | US20030138772 SEQ ID NO: 40 |
| AAV43.5 | 107 | US20030138772 SEQ ID NO: 94 |
| AAV4-4 | 108 | US20150315612 SEQ ID NO: 201 |
| AAV4-4 | 109 | US20150315612 SEQ ID NO: 218 |
| AAV44.1 | 110 | US20030138772 SEQ ID NO: 46 |
| AAV44.1 | 111 | US20030138772 SEQ ID NO: 79 |
| AAV44.5 | 112 | US20030138772 SEQ ID NO: 47 |
| AAV44.5 | 113 | US20030138772 SEQ ID NO: 80 |
| AAV4407 | 114 | US20150315612 SEQ ID NO: 90 |
| AAV5 | 115 | U.S. Pat. No. 7,427,396 SEQ ID NO: 1 |
| AAV5 | 116 | US20030138772 SEQ ID NO: 114 |
| AAV5 | 117 | US20160017295 SEQ ID NO: 5, U.S. Pat. No. 7,427,396 SEQ ID |
| | | NO: 2, US20150315612 SEQ ID NO: 216 |
| AAV5 | 118 | US20150315612 SEQ ID NO: 199 |
| AAV6 | 119 | US20150159173 SEQ ID NO: 13 |
| AAV6 | 120 | US20030138772 SEQ ID NO: 65, US20150159173 SEQ |
| | | ID NO: 29, US20160017295 SEQ ID NO: 6, |
| | | U.S. Pat. No. 6,156,303 SEQ ID NO: 7 |
| AAV6 | 121 | U.S. Pat. No. 6,156,303 SEQ ID NO: 11 |
| AAV6 | 122 | U.S. Pat. No. 6,156,303 SEQ ID NO: 2 |
| AAV6 | 123 | US20150315612 SEQ ID NO: 203 |
| AAV6 | 124 | US20150315612 SEQ ID NO: 220 |
| AAV6.1 | 125 | US20150159173 |
| AAV6.12 | 126 | US20150159173 |
| AAV6.2 | 127 | US20150159173 |
| AAV7 | 128 | US20150159173 SEQ ID NO: 14 |
| AAV7 | 129 | US20150315612 SEQ ID NO: 183 |
| AAV7 | 130 | US20030138772 SEQ ID NO: 2, US20150159173 SEQ |
| | | ID NO: 30, US20150315612 SEQ ID NO: 181, |
| | | US20160017295 SEQ ID NO: 7 |
| AAV7 | 131 | US20030138772 SEQ ID NO: 3 |
| AAV7 | 132 | US20030138772 SEQ ID NO: 1, US20150315612 SEQ |
| | | ID NO: 180 |
| AAV7 | 133 | US20150315612 SEQ ID NO: 213 |
| AAV7 | 134 | US20150315612 SEQ ID NO: 222 |
| AAV8 | 135 | US20150159173 SEQ ID NO: 15 |
| AAV8 | 136 | US20150376240 SEQ ID NO: 7 |
| AAV8 | 137 | US20030138772 SEQ ID NO: 4, US20150315612 SEQ |
| | | ID NO: 182 |
| AAV8 | 138 | US20030138772 SEQ ID NO: 95, US20140359799 SEQ |
| | | ID NO: 1, US20150159173 SEQ ID NO: 31, |
| | | US20160017295 SEQ ID NO: 8, U.S. Pat. No. 7,198,951 SEQ ID |
| | | NO: 7, US20150315612 SEQ ID NO: 223 |
| AAV8 | 139 | US20150376240 SEQ ID NO: 8 |
| AAV8 | 140 | US20150315612 SEQ ID NO: 214 |
| AAV-8b | 141 | US20150376240 SEQ ID NO: 5 |
| AAV-8b | 142 | US20150376240 SEQ ID NO: 3 |
| AAV-8h | 143 | US20150376240 SEQ ID NO: 6 |
| AAV-8h | 144 | US20150376240 SEQ ID NO: 4 |
| AAV9 | 145 | US20030138772 SEQ ID NO: 5 |
| AAV9 | 146 | U.S. Pat. No. 7,198,951 SEQ ID NO: 1 |
| AAV9 | 147 | US20160017295 SEQ ID NO: 9 |
| AAV9 | 148 | US20030138772 SEQ ID NO: 100, U.S. Pat. No. 7,198,951 SEQ ID |
| | | NO: 2 |
| AAV9 | 149 | U.S. Pat. No. 7,198,951 SEQ ID NO: 3 |
| AAV9 (AAVhu.14) | 150 | US20150315612 SEQ ID NO: 3 |
| AAV9 (AAVhu.14) | 151 | US20150315612 SEQ ID NO: 123 |
| AAVA3.1 | 152 | US20030138772 SEQ ID NO: 120 |
| AAVA3.3 | 153 | US20030138772 SEQ ID NO: 57 |
| AAVA3.3 | 154 | US20030138772 SEQ ID NO: 66 |
| AAVA3.4 | 155 | US20030138772 SEQ ID NO: 54 |
| AAVA3.4 | 156 | US20030138772 SEQ ID NO: 68 |
| AAVA3.5 | 157 | US20030138772 SEQ ID NO: 55 |
| AAVA3.5 | 158 | US20030138772 SEQ ID NO: 69 |
| AAVA3.7 | 159 | US20030138772 SEQ ID NO: 56 |
| AAVA3.7 | 160 | US20030138772 SEQ ID NO: 67 |
| AAV29.3 (AAVbb.1) | 161 | US20030138772 SEQ ID NO: 11 |
| AAVC2 | 162 | US20030138772 SEQ ID NO: 61 |
| AAVCh.5 | 163 | US20150159173 SEQ ID NO: 46, US20150315612 SEQ |
| | | ID NO: 234 |
| AAVcy.2 (AAV13.3) | 164 | US20030138772 SEQ ID NO: 15 |
| AAV24.1 | 165 | US20030138772 SEQ ID NO: 101 |
| AAVcy.3 (AAV24.1) | 166 | US20030138772 SEQ ID NO: 16 |
| AAV27.3 | 167 | US20030138772 SEQ ID NO: 104 |
| AAVcy.4 (AAV27.3) | 168 | US20030138772 SEQ ID NO: 17 |
| AAVcy.5 | 169 | US20150315612 SEQ ID NO: 227 |
| AAV7.2 | 170 | US20030138772 SEQ ID NO: 103 |
| AAVcy.5 (AAV7.2) | 171 | US20030138772 SEQ ID NO: 18 |
| AAV16.3 | 172 | US20030138772 SEQ ID NO: 105 |
| AAVcy.6 (AAV16.3) | 173 | US20030138772 SEQ ID NO: 10 |
| AAVcy.5 | 174 | US20150159173 SEQ ID NO: 8 |
| AAVcy.5 | 175 | US20150159173 SEQ ID NO: 24 |
| AAVCy.5R1 | 176 | US20150159173 |
| AAVCy.5R2 | 177 | US20150159173 |
| AAVCy.5R3 | 178 | US20150159173 |
| AAVCy.5R4 | 179 | US20150159173 |
| AAVDJ | 180 | US20140359799 SEQ ID NO: 3, U.S. Pat. No. 7,588,772 SEQ ID |
| | | NO: 2 |
| AAVDJ | 181 | US20140359799 SEQ ID NO: 2, U.S. Pat. No. 7,588,772 SEQ ID |
| | | NO: 1 |
| AAVDJ-8 | 182 | U.S. Pat. No. 7,588,772; Grimm et al 2008 |
| AAVDJ-8 | 183 | U.S. Pat. No. 7,588,772; Grimm et al 2008 |
| AAVF5 | 184 | US20030138772 SEQ ID NO: 110 |
| AAVH2 | 185 | US20030138772 SEQ ID NO: 26 |
| AAVH6 | 186 | US20030138772 SEQ ID NO: 25 |
| AAVhE1.1 | 187 | U.S. Pat. No. 9,233,131 SEQ ID NO: 44 |
| AAVhEr1.14 | 188 | U.S. Pat. No. 9,233,131 SEQ ID NO: 46 |
| AAVhEr1.16 | 189 | U.S. Pat. No. 9,233,131 SEQ ID NO: 48 |
| AAVhEr1.18 | 190 | U.S. Pat. No. 9,233,131 SEQ ID NO: 49 |
| AAVhEr1.23 (AAVhEr2.29) | 191 | U.S. Pat. No. 9,233,131 SEQ ID NO: 53 |
| AAVhEr1.35 | 192 | U.S. Pat. No. 9,233,131 SEQ ID NO: 50 |
| AAVhEr1.36 | 193 | U.S. Pat. No. 9,233,131 SEQ ID NO: 52 |
| AAVhEr1.5 | 194 | U.S. Pat. No. 9,233,131 SEQ ID NO: 45 |
| AAVhEr1.7 | 195 | U.S. Pat. No. 9,233,131 SEQ ID NO: 51 |
| AAVhEr1.8 | 196 | U.S. Pat. No. 9,233,131 SEQ ID NO: 47 |
| AAVhEr2.16 | 197 | U.S. Pat. No. 9,233,131 SEQ ID NO: 55 |
| AAVhEr2.30 | 198 | U.S. Pat. No. 9,233,131 SEQ ID NO: 56 |
| AAVhEr2.31 | 199 | U.S. Pat. No. 9,233,131 SEQ ID NO: 58 |
| AAVhEr2.36 | 200 | U.S. Pat. No. 9,233,131 SEQ ID NO: 57 |
| AAVhEr2.4 | 201 | U.S. Pat. No. 9,233,131 SEQ ID NO: 54 |
| AAVhEr3.1 | 202 | U.S. Pat. No. 9,233,131 SEQ ID NO: 59 |
| AAVhu.1 | 203 | US20150315612 SEQ ID NO: 46 |
| AAVhu.1 | 204 | US20150315612 SEQ ID NO: 144 |
| AAVhu.10 (AAV16.8) | 205 | US20150315612 SEQ ID NO: 56 |
| AAVhu.10 (AAV16.8) | 206 | US20150315612 SEQ ID NO: 156 |
| AAVhu.11 (AAV16.12) | 207 | US20150315612 SEQ ID NO: 57 |
| AAVhu.11 (AAV16.12) | 208 | US20150315612 SEQ ID NO: 153 |
| AAVhu.12 | 209 | US20150315612 SEQ ID NO: 59 |
| AAVhu.12 | 210 | US20150315612 SEQ ID NO: 154 |
| AAVhu.13 | 211 | US20150159173 SEQ ID NO: 16, US20150315612 SEQ |
| | | ID NO: 71 |
| AAVhu.13 | 212 | US20150159173 SEQ ID NO: 32, US20150315612 SEQ |
| | | ID NO: 129 |
| AAVhu.136.1 | 213 | US20150315612 SEQ ID NO: 165 |
| AAVhu.140.1 | 214 | US20150315612 SEQ ID NO: 166 |
| AAVhu.140.2 | 215 | US20150315612 SEQ ID NO: 167 |
| AAVhu.145.6 | 216 | US20150315612 SEQ ID No: 178 |
| AAVhu.15 | 217 | US20150315612 SEQ ID NO: 147 |
| AAVhu.15 (AAV33.4) | 218 | US20150315612 SEQ ID NO: 50 |
| AAVhu.156.1 | 219 | US20150315612 SEQ ID No: 179 |
| AAVhu.16 | 220 | US20150315612 SEQ ID NO: 148 |
| AAVhu.16 (AAV33.8) | 221 | US20150315612 SEQ ID NO: 51 |
| AAVhu.17 | 222 | US20150315612 SEQ ID NO: 83 |
| AAVhu.17 (AAV33.12) | 223 | US20150315612 SEQ ID NO: 4 |
| AAVhu.172.1 | 224 | US20150315612 SEQ ID NO: 171 |
| AAVhu.172.2 | 225 | US20150315612 SEQ ID NO: 172 |
| AAVhu.173.4 | 226 | US20150315612 SEQ ID NO: 173 |
| AAVhu.173.8 | 227 | US20150315612 SEQ ID NO: 175 |
| AAVhu.18 | 228 | US20150315612 SEQ ID NO: 52 |
| AAVhu.18 | 229 | US20150315612 SEQ ID NO: 149 |
| AAVhu.19 | 230 | US20150315612 SEQ ID NO: 62 |
| AAVhu.19 | 231 | US20150315612 SEQ ID NO: 133 |
| AAVhu.2 | 232 | US20150315612 SEQ ID NO: 48 |
| AAVhu.2 | 233 | US20150315612 SEQ ID NO: 143 |
| AAVhu.20 | 234 | US20150315612 SEQ ID NO: 63 |
| AAVhu.20 | 235 | US20150315612 SEQ ID NO: 134 |
| AAVhu.21 | 236 | US20150315612 SEQ ID NO: 65 |
| AAVhu.21 | 237 | US20150315612 SEQ ID NO: 135 |
| AAVhu.22 | 238 | US20150315612 SEQ ID NO: 67 |
| AAVhu.22 | 239 | US20150315612 SEQ ID NO: 138 |
| AAVhu.23 | 240 | US20150315612 SEQ ID NO: 60 |
| AAVhu.23.2 | 241 | US20150315612 SEQ ID NO: 137 |
| AAVhu.24 | 242 | US20150315612 SEQ ID NO: 66 |
| AAVhu.24 | 243 | US20150315612 SEQ ID NO: 136 |
| AAVhu.25 | 244 | US20150315612 SEQ ID NO: 49 |
| AAVhu.25 | 245 | US20150315612 SEQ ID NO: 146 |
| AAVhu.26 | 246 | US20150159173 SEQ ID NO: 17, US20150315612 SEQ |
| | | ID NO: 61 |
| AAVhu.26 | 247 | US20150159173 SEQ ID NO: 33, US20150315612 SEQ |
| | | ID NO: 139 |
| AAVhu.27 | 248 | US20150315612 SEQ ID NO: 64 |
| AAVhu.27 | 249 | US20150315612 SEQ ID NO: 140 |
| AAVhu.28 | 250 | US20150315612 SEQ ID NO: 68 |
| AAVhu.28 | 251 | US20150315612 SEQ ID NO: 130 |
| AAVhu.29 | 252 | US20150315612 SEQ ID NO: 69 |
| AAVhu.29 | 253 | US20150159173 SEQ ID NO: 42, US20150315612 SEQ |
| | | ID NO: 132 |
| AAVhu.29 | 254 | US20150315612 SEQ ID NO: 225 |
| AAVhu.29R | 255 | US20150159173 |
| AAVhu.3 | 256 | US20150315612 SEQ ID NO: 44 |
| AAVhu.3 | 257 | US20150315612 SEQ ID NO: 145 |
| AAVhu.30 | 258 | US20150315612 SEQ ID NO: 70 |
| AAVhu.30 | 259 | US20150315612 SEQ ID NO: 131 |
| AAVhu.31 | 260 | US20150315612 SEQ ID NO: 1 |
| AAVhu.31 | 261 | US20150315612 SEQ ID NO: 121 |
| AAVhu.32 | 262 | US20150315612 SEQ ID NO: 2 |
| AAVhu.32 | 263 | US20150315612 SEQ ID NO: 122 |
| AAVhu.33 | 264 | US20150315612 SEQ ID NO: 75 |
| AAVhu.33 | 265 | US20150315612 SEQ ID NO: 124 |
| AAVhu.34 | 266 | US20150315612 SEQ ID NO: 72 |
| AAVhu.34 | 267 | US20150315612 SEQ ID NO: 125 |
| AAVhu.35 | 268 | US20150315612 SEQ ID NO: 73 |
| AAVhu.35 | 269 | US20150315612 SEQ ID NO: 164 |
| AAVhu.36 | 270 | US20150315612 SEQ ID NO: 74 |
| AAVhu.36 | 271 | US20150315612 SEQ ID NO: 126 |
| AAVhu.37 | 272 | US20150159173 SEQ ID NO: 34, US20150315612 SEQ |
| | | ID NO: 88 |
| AAVhu.37 (AAV106.1) | 273 | US20150315612 SEQ ID NO: 10, US20150159173 SEQ |
| | | ID NO: 18 |
| AAVhu.38 | 274 | US20150315612 SEQ ID NO: 161 |
| AAVhu.39 | 275 | US20150315612 SEQ ID NO: 102 |
| AAVhu.39 (AAVLG-9) | 276 | US20150315612 SEQ ID NO: 24 |
| AAVhu.4 | 277 | US20150315612 SEQ ID NO: 47 |
| AAVhu.4 | 278 | US20150315612 SEQ ID NO: 141 |
| AAVhu.40 | 279 | US20150315612 SEQ ID NO: 87 |
| AAVhu.40 (AAV114.3) | 280 | US20150315612 SEQ ID No: 11 |
| AAVhu.41 | 281 | US20150315612 SEQ ID NO: 91 |
| AAVhu.41 (AAV127.2) | 282 | US20150315612 SEQ ID NO: 6 |
| AAVhu.42 | 283 | US20150315612 SEQ ID NO: 85 |
| AAVhu.42 (AAV127.5) | 284 | US20150315612 SEQ ID NO: 8 |
| AAVhu.43 | 285 | US20150315612 SEQ ID NO: 160 |
| AAVhu.43 | 286 | US20150315612 SEQ ID NO: 236 |
| AAVhu.43 (AAV128.1) | 287 | US20150315612 SEQ ID NO: 80 |
| AAVhu.44 | 288 | US20150159173 SEQ ID NO: 45, US20150315612 SEQ |
| | | ID NO: 158 |
| AAVhu.44 (AAV128.3) | 289 | US20150315612 SEQ ID NO: 81 |
| AAVhu.44R1 | 290 | US20150159173 |
| AAVhu.44R2 | 291 | US20150159173 |
| AAVhu.44R3 | 292 | US20150159173 |
| AAVhu.45 | 293 | US20150315612 SEQ ID NO: 76 |
| AAVhu.45 | 294 | US20150315612 SEQ ID NO: 127 |
| AAVhu.46 | 295 | US20150315612 SEQ ID NO: 82 |
| AAVhu.46 | 296 | US20150315612 SEQ ID NO: 159 |
| AAVhu.46 | 297 | US20150315612 SEQ ID NO: 224 |
| AAVhu.47 | 298 | US20150315612 SEQ ID NO: 77 |
| AAVhu.47 | 299 | US20150315612 SEQ ID NO: 128 |
| AAVhu.48 | 300 | US20150159173 SEQ ID NO: 38 |
| AAVhu.48 | 301 | US20150315612 SEQ ID NO: 157 |
| AAVhu.48 (AAV130.4) | 302 | US20150315612 SEQ ID NO: 78 |
| AAVhu.48R1 | 303 | US20150159173 |
| AAVhu.48R2 | 304 | US20150159173 |
| AAVhu.48R3 | 305 | US20150159173 |
| AAVhu.49 | 306 | US20150315612 SEQ ID NO: 209 |
| AAVhu.49 | 307 | US20150315612 SEQ ID NO: 189 |
| AAVhu.5 | 308 | US20150315612 SEQ ID NO: 45 |
| AAVhu.5 | 309 | US20150315612 SEQ ID NO: 142 |
| AAVhu.51 | 310 | US20150315612 SEQ ID NO: 208 |
| AAVhu.51 | 311 | US20150315612 SEQ ID NO: 190 |
| AAVhu.52 | 312 | US20150315612 SEQ ID NO: 210 |
| AAVhu.52 | 313 | US20150315612 SEQ ID NO: 191 |
| AAVhu.53 | 314 | US20150159173 SEQ ID NO: 19 |
| AAVhu.53 | 315 | US20150159173 SEQ ID NO: 35 |
| AAVhu.53 (AAV145.1) | 316 | US20150315612 SEQ ID NO: 176 |
| AAVhu.54 | 317 | US20150315612 SEQ ID NO: 188 |
| AAVhu.54 (AAV145.5) | 318 | US20150315612 SEQ ID No: 177 |
| AAVhu.55 | 319 | US20150315612 SEQ ID NO: 187 |
| AAVhu.56 | 320 | US20150315612 SEQ ID NO: 205 |
| AAVhu.56 (AAV145.6) | 321 | US20150315612 SEQ ID NO: 168 |
| AAVhu.56 (AAV145.6) | 322 | US20150315612 SEQ ID NO: 192 |
| AAVhu.57 | 323 | US20150315612 SEQ ID NO: 206 |
| AAVhu.57 | 324 | US20150315612 SEQ ID NO: 169 |
| AAVhu.57 | 325 | US20150315612 SEQ ID NO: 193 |
| AAVhu.58 | 326 | US20150315612 SEQ ID NO: 207 |
| AAVhu.58 | 327 | US20150315612 SEQ ID NO: 194 |
| AAVhu.6 (AAV3.1) | 328 | US20150315612 SEQ ID NO: 5 |
| AAVhu.6 (AAV3.1) | 329 | US20150315612 SEQ ID NO: 84 |
| AAVhu.60 | 330 | US20150315612 SEQ ID NO: 184 |
| AAVhu.60 (AAV161.10) | 331 | US20150315612 SEQ ID NO: 170 |
| AAVhu.61 | 332 | US20150315612 SEQ ID NO: 185 |
| AAVhu.61 (AAV161.6) | 333 | US20150315612 SEQ ID NO: 174 |
| AAVhu.63 | 334 | US20150315612 SEQ ID NO: 204 |
| AAVhu.63 | 335 | US20150315612 SEQ ID NO: 195 |
| AAVhu.64 | 336 | US20150315612 SEQ ID NO: 212 |
| AAVhu.64 | 337 | US20150315612 SEQ ID NO: 196 |
| AAVhu.66 | 338 | US20150315612 SEQ ID NO: 197 |
| AAVhu.67 | 339 | US20150315612 SEQ ID NO: 215 |
| AAVhu.67 | 340 | US20150315612 SEQ ID NO: 198 |
| AAVhu.7 | 341 | US20150315612 SEQ ID NO: 226 |
| AAVhu.7 | 342 | US20150315612 SEQ ID NO: 150 |
| AAVhu.7 (AAV7.3) | 343 | US20150315612 SEQ ID NO: 55 |
| AAVhu.71 | 344 | US20150315612 SEQ ID NO: 79 |
| AAVhu.8 | 345 | US20150315612 SEQ ID NO: 53 |
| AAVhu.8 | 346 | US20150315612 SEQ ID NO: 12 |
| AAVhu.8 | 347 | US20150315612 SEQ ID NO: 151 |
| AAVhu.9 (AAV3.1) | 348 | US20150315612 SEQ ID NO: 58 |
| AAVhu.9 (AAV3.1) | 349 | US20150315612 SEQ ID NO: 155 |
| AAV-LK01 | 350 | US20150376607 SEQ ID NO: 2 |
| AAV-LK01 | 351 | US20150376607 SEQ ID NO: 29 |
| AAV-LK02 | 352 | US20150376607 SEQ ID NO: 3 |
| AAV-LK02 | 353 | US20150376607 SEQ ID NO: 30 |
| AAV-LK03 | 354 | US20150376607 SEQ ID NO: 4 |
| AAV-LK03 | 355 | WO2015121501 SEQ ID NO: 12, US20150376607 SEQ |
| | | ID NO: 31 |
| AAV-LK04 | 356 | US20150376607 SEQ ID NO: 5 |
| AAV-LK04 | 357 | US20150376607 SEQ ID NO: 32 |
| AAV-LK05 | 358 | US20150376607 SEQ ID NO: 6 |
| AAV-LK05 | 359 | US20150376607 SEQ ID NO: 33 |
| AAV-LK06 | 360 | US20150376607 SEQ ID NO: 7 |
| AAV-LK06 | 361 | US20150376607 SEQ ID NO: 34 |
| AAV-LK07 | 362 | US20150376607 SEQ ID NO: 8 |
| AAV-LK07 | 363 | US20150376607 SEQ ID NO: 35 |
| AAV-LK08 | 364 | US20150376607 SEQ ID NO: 9 |
| AAV-LK08 | 365 | US20150376607 SEQ ID NO: 36 |
| AAV-LK09 | 366 | US20150376607 SEQ ID NO: 10 |
| AAV-LK09 | 367 | US20150376607 SEQ ID NO: 37 |
| AAV-LK10 | 368 | US20150376607 SEQ ID NO: 11 |
| AAV-LK10 | 369 | US20150376607 SEQ ID NO: 38 |
| AAV-LK11 | 370 | US20150376607 SEQ ID NO: 12 |
| AAV-LK11 | 371 | US20150376607 SEQ ID NO: 39 |
| AAV-LK12 | 372 | US20150376607 SEQ ID NO: 13 |
| AAV-LK12 | 373 | US20150376607 SEQ ID NO: 40 |
| AAV-LK13 | 374 | US20150376607 SEQ ID NO: 14 |
| AAV-LK13 | 375 | US20150376607 SEQ ID NO: 41 |
| AAV-LK14 | 376 | US20150376607 SEQ ID NO: 15 |
| AAV-LK14 | 377 | US20150376607 SEQ ID NO: 42 |
| AAV-LK15 | 378 | US20150376607 SEQ ID NO: 16 |
| AAV-LK15 | 379 | US20150376607 SEQ ID NO: 43 |
| AAV-LK16 | 380 | US20150376607 SEQ ID NO: 17 |
| AAV-LK16 | 381 | US20150376607 SEQ ID NO: 44 |
| AAV-LK17 | 382 | US20150376607 SEQ ID NO: 18 |
| AAV-LK17 | 383 | US20150376607 SEQ ID NO: 45 |
| AAV-LK18 | 384 | US20150376607 SEQ ID NO: 19 |
| AAV-LK18 | 385 | US20150376607 SEQ ID NO: 46 |
| AAV-LK19 | 386 | US20150376607 SEQ ID NO: 20 |
| AAV-LK19 | 387 | US20150376607 SEQ ID NO: 47 |
| AAV-PAEC | 388 | US20150376607 SEQ ID NO: 1 |
| AAV-PAEC | 389 | US20150376607 SEQ ID NO: 48 |
| AAV-PAEC11 | 390 | US20150376607 SEQ ID NO: 26 |
| AAV-PAEC11 | 391 | US20150376607 SEQ ID NO: 54 |
| AAV-PAEC12 | 392 | US20150376607 SEQ ID NO: 27 |
| AAV-PAEC12 | 393 | US20150376607 SEQ ID NO: 51 |
| AAV-PAEC13 | 394 | US20150376607 SEQ ID NO: 28 |
| AAV-PAEC13 | 395 | US20150376607 SEQ ID NO: 49 |
| AAV-PAEC2 | 396 | US20150376607 SEQ ID NO: 21 |
| AAV-PAEC2 | 397 | US20150376607 SEQ ID NO: 56 |
| AAV-PAEC4 | 398 | US20150376607 SEQ ID NO: 22 |
| AAV-PAEC4 | 399 | US20150376607 SEQ ID NO: 55 |
| AAV-PAEC6 | 400 | US20150376607 SEQ ID NO: 23 |
| AAV-PAEC6 | 401 | US20150376607 SEQ ID NO: 52 |
| AAV-PAEC7 | 402 | US20150376607 SEQ ID NO: 24 |
| AAV-PAEC7 | 403 | US20150376607 SEQ ID NO: 53 |
| AAV-PAEC8 | 404 | US20150376607 SEQ ID NO: 25 |
| AAV-PAEC8 | 405 | US20150376607 SEQ ID NO: 50 |
| AAVpi.1 | 406 | US20150315612 SEQ ID NO: 28 |
| AAVpi.1 | 407 | US20150315612 SEQ ID NO: 93 |
| AAVpi.2 | 408 | US20150315612 SEQ ID NO: 30 |
| AAVpi.2 | 409 | US20150315612 SEQ ID NO: 95 |
| AAVpi.3 | 410 | US20150315612 SEQ ID NO: 29 |
| AAVpi.3 | 411 | US20150315612 SEQ ID NO: 94 |
| AAVrh.10 | 412 | US20150159173 SEQ ID NO: 9 |
| AAVrh.10 | 413 | US20150159173 SEQ ID NO: 25 |
| AAV44.2 | 414 | US20030138772 SEQ ID NO: 59 |
| AAVrh.10 (AAV44.2) | 415 | US20030138772 SEQ ID NO: 81 |
| AAV42.1B | 416 | US20030138772 SEQ ID NO: 90 |
| AAVrh.12 (AAV42.1b) | 417 | US20030138772 SEQ ID NO: 30 |
| AAVrh.13 | 418 | US20150159173 SEQ ID NO: 10 |
| AAVrh.13 | 419 | US20150159173 SEQ ID NO: 26 |
| AAVrh.13 | 420 | US20150315612 SEQ ID NO: 228 |
| AAVrh.13R | 421 | US20150159173 |
| AAV42.3A | 422 | US20030138772 SEQ ID NO: 87 |
| AAVrh.14 (AAV42.3a) | 423 | US20030138772 SEQ ID NO: 32 |
| AAV42.5A | 424 | US20030138772 SEQ ID NO: 89 |
| AAVrh.17 (AAV42.5a) | 425 | US20030138772 SEQ ID NO: 34 |
| AAV42.5B | 426 | US20030138772 SEQ ID NO: 91 |
| AAVrh.18 (AAV42.5b) | 427 | US20030138772 SEQ ID NO: 29 |
| AAV42.6B | 428 | US20030138772 SEQ ID NO: 112 |
| AAVrh.19 (AAV42.6b) | 429 | US20030138772 SEQ ID NO: 38 |
| AAVrh.2 | 430 | US20150159173 SEQ ID NO: 39 |
| AAVrh.2 | 431 | US20150315612 SEQ ID NO: 231 |
| AAVrh.20 | 432 | US20150159173 SEQ ID NO: 1 |
| AAV42.10 | 433 | US20030138772 SEQ ID NO: 106 |
| AAVrh.21 (AAV42.10) | 434 | US20030138772 SEQ ID NO: 35 |
| AAV42.11 | 435 | US20030138772 SEQ ID NO: 108 |
| AAVrh.22 (AAV42.11) | 436 | US20030138772 SEQ ID NO: 37 |
| AAV42.12 | 437 | US20030138772 SEQ ID NO: 113 |
| AAVrh.23 (AAV42.12) | 438 | US20030138772 SEQ ID NO: 58 |
| AAV42.13 | 439 | US20030138772 SEQ ID NO: 86 |
| AAVrh.24 (AAV42.13) | 440 | US20030138772 SEQ ID NO: 31 |
| AAV42.15 | 441 | US20030138772 SEQ ID NO: 84 |
| AAVrh.25 (AAV42.15) | 442 | US20030138772 SEQ ID NO: 28 |
| AAVrh.2R | 443 | US20150159173 |
| AAVrh.31 (AAV223.1) | 444 | US20030138772 SEQ ID NO: 48 |
| AAVC1 | 445 | US20030138772 SEQ ID NO: 60 |
| AAVrh.32 (AAVC1) | 446 | US20030138772 SEQ ID NO: 19 |
| AAVrh.32/33 | 447 | US20150159173 SEQ ID NO: 2 |
| AAVrh.33 (AAVC3) | 448 | US20030138772 SEQ ID NO: 20 |
| AAVC5 | 449 | US20030138772 SEQ ID NO: 62 |
| AAVrh.34 (AAVC5) | 450 | US20030138772 SEQ ID NO: 21 |
| AAVF1 | 451 | US20030138772 SEQ ID NO: 109 |
| AAVrh.35 (AAVF1) | 452 | US20030138772 SEQ ID NO: 22 |
| AAVF3 | 453 | US20030138772 SEQ ID NO: 111 |
| AAVrh.36 (AAVF3) | 454 | US20030138772 SEQ ID NO: 23 |
| AAVrh.37 | 455 | US20030138772 SEQ ID NO: 24 |
| AAVrh.37 | 456 | US20150159173 SEQ ID NO: 40 |
| AAVrh.37 | 457 | US20150315612 SEQ ID NO: 229 |
| AAVrh.37R2 | 458 | US20150159173 |
| AAVrh.38 (AAVLG-4) | 459 | US20150315612 SEQ ID NO: 7 |
| AAVrh.38 (AAVLG-4) | 460 | US20150315612 SEQ ID NO: 86 |
| AAVrh.39 | 461 | US20150159173 SEQ ID NO: 20, US20150315612 SEQ |
| | | ID NO: 13 |
| AAVrh.39 | 462 | US20150159173 SEQ ID NO: 3, US20150159173 SEQ |
| | | ID NO: 36, US20150315612 SEQ ID NO: 89 |
| AAVrh.40 | 463 | US20150315612 SEQ ID NO: 92 |
| AAVrh.40 (AAVLG-10) | 464 | US20150315612 SEQ ID No: 14 |
| AAVrh.43 (AAVN721-8) | 465 | US20150315612 SEQ ID NO: 43, US20150159173 SEQ |
| | | ID NO: 21 |
| AAVrh.43 (AAVN721-8) | 466 | US20150315612 SEQ ID NO: 163, US20150159173 |
| | | SEQ ID NO: 37 |
| AAVrh.44 | 467 | US20150315612 SEQ ID NO: 34 |
| AAVrh.44 | 468 | US20150315612 SEQ ID NO: 111 |
| AAVrh.45 | 469 | US20150315612 SEQ ID NO: 41 |
| AAVrh.45 | 470 | US20150315612 SEQ ID NO: 109 |
| AAVrh.46 | 471 | US20150159173 SEQ ID NO: 22, US20150315612 SEQ |
| | | ID NO: 19 |
| AAVrh.46 | 472 | US20150159173 SEQ ID NO: 4, US20150315612 SEQ |
| | | ID NO: 101 |
| AAVrh.47 | 473 | US20150315612 SEQ ID NO: 38 |
| AAVrh.47 | 474 | US20150315612 SEQ ID NO: 118 |
| AAVrh.48 | 475 | US20150159173 SEQ ID NO: 44, US20150315612 SEQ |
| | | ID NO: 115 |
| AAVrh.48.1 | 476 | US20150159173 |
| AAVrh.48.1.2 | 477 | US20150159173 |
| AAVrh.48.2 | 478 | US20150159173 |
| AAVrh.48 (AAV1-7) | 479 | US20150315612 SEQ ID NO: 32 |
| AAVrh.49 (AAV1-8) | 480 | US20150315612 SEQ ID NO: 25 |
| AAVrh.49 (AAV1-8) | 481 | US20150315612 SEQ ID NO: 103 |
| AAVrh.50 (AAV2-4) | 482 | US20150315612 SEQ ID NO: 23 |
| AAVrh.50 (AAV2-4) | 483 | US20150315612 SEQ ID NO: 108 |
| AAVrh.51 (AAV2-5) | 484 | US20150315612 SEQ ID No: 22 |
| AAVrh.51 (AAV2-5) | 485 | US20150315612 SEQ ID NO: 104 |
| AAVrh.52 (AAV3-9) | 486 | US20150315612 SEQ ID NO: 18 |
| AAVrh.52 (AAV3-9) | 487 | US20150315612 SEQ ID NO: 96 |
| AAVrh.53 | 488 | US20150315612 SEQ ID NO: 97 |
| AAVrh.53 (AAV3-11) | 489 | US20150315612 SEQ ID NO: 17 |
| AAVrh.53 (AAV3-11) | 490 | US20150315612 SEQ ID NO: 186 |
| AAVrh.54 | 491 | US20150315612 SEQ ID NO: 40 |
| AAVrh.54 | 492 | US20150159173 SEQ ID NO: 49, US20150315612 SEQ |
| | | ID NO: 116 |
| AAVrh.55 | 493 | US20150315612 SEQ ID NO: 37 |
| AAVrh.55 (AAV4-19) | 494 | US20150315612 SEQ ID NO: 117 |
| AAVrh.56 | 495 | US20150315612 SEQ ID NO: 54 |
| AAVrh.56 | 496 | US20150315612 SEQ ID NO: 152 |
| AAVrh.57 | 497 | US20150315612 SEQ ID NO: 26 |
| AAVrh.57 | 498 | US20150315612 SEQ ID NO: 105 |
| AAVrh.58 | 499 | US20150315612 SEQ ID NO: 27 |
| AAVrh.58 | 500 | US20150159173 SEQ ID NO: 48, US20150315612 SEQ |
| | | ID NO: 106 |
| AAVrh.58 | 501 | US20150315612 SEQ ID NO: 232 |
| AAVrh.59 | 502 | US20150315612 SEQ ID NO: 42 |
| AAVrh.59 | 503 | US20150315612 SEQ ID NO: 110 |
| AAVrh.60 | 504 | US20150315612 SEQ ID NO: 31 |
| AAVrh.60 | 505 | US20150315612 SEQ ID NO: 120 |
| AAVrh.61 | 506 | US20150315612 SEQ ID NO: 107 |
| AAVrh.61 (AAV2-3) | 507 | US20150315612 SEQ ID NO: 21 |
| AAVrh.62 (AAV2-15) | 508 | US20150315612 SEQ ID No: 33 |
| AAVrh.62 (AAV2-15) | 509 | US20150315612 SEQ ID NO: 114 |
| AAVrh.64 | 510 | US20150315612 SEQ ID No: 15 |
| AAVrh.64 | 511 | US20150159173 SEQ ID NO: 43, US20150315612 SEQ |
| | | ID NO: 99 |
| AAVrh.64 | 512 | US20150315612 SEQ ID NO: 233 |
| AAVRh.64R1 | 513 | US20150159173 |
| AAVRh.64R2 | 514 | US20150159173 |
| AAVrh.65 | 515 | US20150315612 SEQ ID NO: 35 |
| AAVrh.65 | 516 | US20150315612 SEQ ID NO: 112 |
| AAVrh.67 | 517 | US20150315612 SEQ ID NO: 36 |
| AAVrh.67 | 518 | US20150315612 SEQ ID NO: 230 |
| AAVrh.67 | 519 | US20150159173 SEQ ID NO: 47, US20150315612 SEQ |
| | | ID NO: 113 |
| AAVrh.68 | 520 | US20150315612 SEQ ID NO: 16 |
| AAVrh.68 | 521 | US20150315612 SEQ ID NO: 100 |
| AAVrh.69 | 522 | US20150315612 SEQ ID NO: 39 |
| AAVrh.69 | 523 | US20150315612 SEQ ID NO: 119 |
| AAVrh.70 | 524 | US20150315612 SEQ ID NO: 20 |
| AAVrh.70 | 525 | US20150315612 SEQ ID NO: 98 |
| AAVrh.71 | 526 | US20150315612 SEQ ID NO: 162 |
| AAVrh.72 | 527 | US20150315612 SEQ ID NO: 9 |
| AAVrh.73 | 528 | US20150159173 SEQ ID NO: 5 |
| AAVrh.74 | 529 | US20150159173 SEQ ID NO: 6 |
| AAVrh.8 | 530 | US20150159173 SEQ ID NO: 41 |
| AAVrh.8 | 531 | US20150315612 SEQ ID NO: 235 |
| AAVrh.8R | 532 | US20150159173, WO2015168666 SEQ ID NO: 9 |
| AAVrh.8R A586R mutant | 533 | WO2015168666 SEQ ID NO: 10 |
| AAVrh.8R R533A mutant | 534 | WO2015168666 SEQ ID NO: 11 |
| BAAV (bovine AAV) | 535 | U.S. Pat. No. 9,193,769 SEQ ID NO: 8 |
| BAAV (bovine AAV) | 536 | U.S. Pat. No. 9,193,769 SEQ ID NO: 10 |
| BAAV (bovine AAV) | 537 | U.S. Pat. No. 9,193,769 SEQ ID NO: 4 |
| BAAV (bovine AAV) | 538 | U.S. Pat. No. 9,193,769 SEQ ID NO: 2 |
| BAAV (bovine AAV) | 539 | U.S. Pat. No. 9,193,769 SEQ ID NO: 6 |
| BAAV (bovine AAV) | 540 | U.S. Pat. No. 9,193,769 SEQ ID NO: 1 |
| BAAV (bovine AAV) | 541 | U.S. Pat. No. 9,193,769 SEQ ID NO: 5 |
| BAAV (bovine AAV) | 542 | U.S. Pat. No. 9,193,769 SEQ ID NO: 3 |
| BAAV (bovine AAV) | 543 | U.S. Pat. No. 9,193,769 SEQ ID NO: 11 |
| BAAV (bovine AAV) | 544 | U.S. Pat. No. 7,427,396 SEQ ID NO: 5 |
| BAAV (bovine AAV) | 545 | U.S. Pat. No. 7,427,396 SEQ ID NO: 6 |
| BAAV (bovine AAV) | 546 | U.S. Pat. No. 9,193,769 SEQ ID NO: 7 |
| BAAV (bovine AAV) | 547 | U.S. Pat. No. 9,193,769 SEQ ID NO: 9 |
| BNP61 AAV | 548 | US20150238550 SEQ ID NO: 1 |
| BNP61 AAV | 549 | US20150238550 SEQ ID NO: 2 |
| BNP62 AAV | 550 | US20150238550 SEQ ID NO: 3 |
| BNP63 AAV | 551 | US20150238550 SEQ ID NO: 4 |
| caprine AAV | 552 | U.S. Pat. No. 7,427,396 SEQ ID NO: 3 |
| caprine AAV | 553 | U.S. Pat. No. 7,427,396 SEQ ID NO: 4 |
| true type AAV (ttAAV) | 554 | WO2015121501 SEQ ID NO: 2 |
| AAAV (Avian AAV) | 555 | U.S. Pat. No. 9,238,800 SEQ ID NO: 12 |
| AAAV (Avian AAV) | 556 | U.S. Pat. No. 9,238,800 SEQ ID NO: 2 |
| AAAV (Avian AAV) | 557 | U.S. Pat. No. 9,238,800 SEQ ID NO: 6 |
| AAAV (Avian AAV) | 558 | U.S. Pat. No. 9,238,800 SEQ ID NO: 4 |
| AAAV (Avian AAV) | 559 | U.S. Pat. No. 9,238,800 SEQ ID NO: 8 |
| AAAV (Avian AAV) | 560 | U.S. Pat. No. 9,238,800 SEQ ID NO: 14 |
| AAAV (Avian AAV) | 561 | U.S. Pat. No. 9,238,800 SEQ ID NO: 10 |
| AAAV (Avian AAV) | 562 | U.S. Pat. No. 9,238,800 SEQ ID NO: 15 |
| AAAV (Avian AAV) | 563 | U.S. Pat. No. 9,238,800 SEQ ID NO: 5 |
| AAAV (Avian AAV) | 564 | U.S. Pat. No. 9,238,800 SEQ ID NO: 9 |
| AAAV (Avian AAV) | 565 | U.S. Pat. No. 9,238,800 SEQ ID NO: 3 |
| AAAV (Avian AAV) | 566 | U.S. Pat. No. 9,238,800 SEQ ID NO: 7 |
| AAAV (Avian AAV) | 567 | U.S. Pat. No. 9,238,800 SEQ ID NO: 11 |
| AAAV (Avian AAV) | 568 | U.S. Pat. No. 9,238,800 SEQ ID NO: 13 |
| AAAV (Avian AAV) | 569 | U.S. Pat. No. 9,238,800 SEQ ID NO: 1 |
| AAV Shuffle 100-1 | 570 | US20160017295 SEQ ID NO: 23 |
| AAV Shuffle 100-1 | 571 | US20160017295 SEQ ID NO: 11 |
| AAV Shuffle 100-2 | 572 | US20160017295 SEQ ID NO: 37 |
| AAV Shuffle 100-2 | 573 | US20160017295 SEQ ID NO: 29 |
| AAV Shuffle 100-3 | 574 | US20160017295 SEQ ID NO: 24 |
| AAV Shuffle 100-3 | 575 | US20160017295 SEQ ID NO: 12 |
| AAV Shuffle 100-7 | 576 | US20160017295 SEQ ID NO: 25 |
| AAV Shuffle 100-7 | 577 | US20160017295 SEQ ID NO: 13 |
| AAV Shuffle 10-2 | 578 | US20160017295 SEQ ID NO: 34 |
| AAV Shuffle 10-2 | 579 | US20160017295 SEQ ID NO: 26 |
| AAV Shuffle 10-6 | 580 | US20160017295 SEQ ID NO: 35 |
| AAV Shuffle 10-6 | 581 | US20160017295 SEQ ID NO: 27 |
| AAV Shuffle 10-8 | 582 | US20160017295 SEQ ID NO: 36 |
| AAV Shuffle 10-8 | 583 | US20160017295 SEQ ID NO: 28 |
| AAV SM 100-10 | 584 | US20160017295 SEQ ID NO: 41 |
| AAV SM 100-10 | 585 | US20160017295 SEQ ID NO: 33 |
| AAV SM 100-3 | 586 | US20160017295 SEQ ID NO: 40 |
| AAV SM 100-3 | 587 | US20160017295 SEQ ID NO: 32 |
| AAV SM 10-1 | 588 | US20160017295 SEQ ID NO: 38 |
| AAV SM 10-1 | 589 | US20160017295 SEQ ID NO: 30 |
| AAV SM 10-2 | 590 | US20160017295 SEQ ID NO: 10 |
| AAV SM 10-2 | 591 | US20160017295 SEQ ID NO: 22 |
| AAV SM 10-8 | 592 | US20160017295 SEQ ID NO: 39 |
| AAV SM 10-8 | 593 | US20160017295 SEQ ID NO: 31 |
| AAV CBr-7.1 | 594 | WO2016065001 SEQ ID NO: 4 |
| AAV CBr-7.1 | 595 | WO2016065001 SEQ ID NO: 54 |
| AAV CBr-7.10 | 596 | WO2016065001 SEQ ID NO: 11 |
| AAV CBr-7.10 | 597 | WO2016065001 SEQ ID NO: 61 |
| AAV CBr-7.2 | 598 | WO2016065001 SEQ ID NO: 5 |
| AAV CBr-7.2 | 599 | WO2016065001 SEQ ID NO: 55 |
| AAV CBr-7.3 | 600 | WO2016065001 SEQ ID NO: 6 |
| AAV CBr-7.3 | 601 | WO2016065001 SEQ ID NO: 56 |
| AAV CBr-7.4 | 602 | WO2016065001 SEQ ID NO: 7 |
| AAV CBr-7.4 | 603 | WO2016065001 SEQ ID NO: 57 |
| AAV CBr-7.5 | 604 | WO2016065001 SEQ ID NO: 8 |
| AAV CBr-7.5 | 605 | WO2016065001 SEQ ID NO: 58 |
| AAV CBr-7.7 | 606 | WO2016065001 SEQ ID NO: 9 |
| AAV CBr-7.7 | 607 | WO2016065001 SEQ ID NO: 59 |
| AAV CBr-7.8 | 608 | WO2016065001 SEQ ID NO: 10 |
| AAV CBr-7.8 | 609 | WO2016065001 SEQ ID NO: 60 |
| AAV CBr-B7.3 | 610 | WO2016065001 SEQ ID NO: 46 |
| AAV CBr-B7.3 | 611 | WO2016065001 SEQ ID NO: 96 |
| AAV CBr-B7.4 | 612 | WO2016065001 SEQ ID NO: 47 |
| AAV CBr-B7.4 | 613 | WO2016065001 SEQ ID NO: 97 |
| AAV CBr-E1 (AAV CLv- | 614 | U.S. Pat. No. 8,734,809 SEQ ID NO: 13 |
| E1) | | |
| AAV CBr-E1 (AAV CLv- | 615 | U.S. Pat. No. 8,734,809 SEQ ID NO: 87 |
| E1) | | |
| AAV CBr-E2 | 616 | U.S. Pat. No. 8,734,809 SEQ ID NO: 14 |
| AAV CBr-E2 | 617 | U.S. Pat. No. 8,734,809 SEQ ID NO: 88 |
| AAV CBr-E3 | 618 | U.S. Pat. No. 8,734,809 SEQ ID NO: 15 |
| AAV CBr-E3 | 619 | U.S. Pat. No. 8,734,809 SEQ ID NO: 89 |
| AAV CBr-E4 | 620 | U.S. Pat. No. 8,734,809 SEQ ID NO: 16 |
| AAV CBr-E4 | 621 | U.S. Pat. No. 8,734,809 SEQ ID NO: 90 |
| AAV CBr-E5 | 622 | U.S. Pat. No. 8,734,809 SEQ ID NO: 17 |
| AAV CBr-e5 | 623 | U.S. Pat. No. 8,734,809 SEQ ID NO: 18 |
| AAV CBr-E5 | 624 | U.S. Pat. No. 8,734,809 SEQ ID NO: 91 |
| AAV CBr-e5 | 625 | U.S. Pat. No. 8,734,809 SEQ ID NO: 92 |
| AAV CBr-E6 | 626 | U.S. Pat. No. 8,734,809 SEQ ID NO: 19 |
| AAV CBr-E6 | 627 | U.S. Pat. No. 8,734,809 SEQ ID NO: 93 |
| AAV CBr-E7 | 628 | U.S. Pat. No. 8,734,809 SEQ ID NO: 20 |
| AAV CBr-E7 | 629 | U.S. Pat. No. 8,734,809 SEQ ID NO: 94 |
| AAV CBr-E8 | 630 | U.S. Pat. No. 8,734,809 SEQ ID NO: 21 |
| AAV CBr-E8 | 631 | U.S. Pat. No. 8,734,809 SEQ ID NO: 95 |
| AAV CHt-1 | 632 | U.S. Pat. No. 8,734,809 SEQ ID NO: 86 |
| AAV CHt-1 | 633 | U.S. Pat. No. 8,734,809 SEQ ID NO: 160 |
| AAV CHt-2 | 634 | U.S. Pat. No. 8,734,809 SEQ ID NO: 55 |
| AAV CHt-2 | 635 | U.S. Pat. No. 8,734,809 SEQ ID NO: 129 |
| AAV CHt-3 | 636 | U.S. Pat. No. 8,734,809 SEQ ID NO: 56 |
| AAV CHt-3 | 637 | U.S. Pat. No. 8,734,809 SEQ ID NO: 130 |
| AAV CHt-6.1 | 638 | WO2016065001 SEQ ID NO: 32 |
| AAV CHt-6.1 | 639 | WO2016065001 SEQ ID NO: 82 |
| AAV CHt-6.10 | 640 | WO2016065001 SEQ ID NO: 33 |
| AAV CHt-6.10 | 641 | WO2016065001 SEQ ID NO: 83 |
| AAV CHt-6.5 | 642 | WO2016065001 SEQ ID NO: 34 |
| AAV CHt-6.5 | 643 | WO2016065001 SEQ ID NO: 84 |
| AAV CHt-6.6 | 644 | WO2016065001 SEQ ID NO: 35 |
| AAV CHt-6.6 | 645 | WO2016065001 SEQ ID NO: 85 |
| AAV CHt-6.7 | 646 | WO2016065001 SEQ ID NO: 36 |
| AAV CHt-6.7 | 647 | WO2016065001 SEQ ID NO: 86 |
| AAV CHt-6.8 | 648 | WO2016065001 SEQ ID NO: 37 |
| AAV CHt-6.8 | 649 | WO2016065001 SEQ ID NO: 87 |
| AAV CHt-P1 | 650 | WO2016065001 SEQ ID NO: 29 |
| AAV CHt-P1 | 651 | WO2016065001 SEQ ID NO: 79 |
| AAV CHt-P2 | 652 | WO2016065001 SEQ ID NO: 1 |
| AAV CHt-P2 | 653 | WO2016065001 SEQ ID NO: 51 |
| AAV CHt-P5 | 654 | WO2016065001 SEQ ID NO: 2 |
| AAV CHt-P5 | 655 | WO2016065001 SEQ ID NO: 52 |
| AAV CHt-P6 | 656 | WO2016065001 SEQ ID NO: 30 |
| AAV CHt-P6 | 657 | WO2016065001 SEQ ID NO: 80 |
| AAV CHt-P8 | 658 | WO2016065001 SEQ ID NO: 31 |
| AAV CHt-P8 | 659 | WO2016065001 SEQ ID NO: 81 |
| AAV CHt-P9 | 660 | WO2016065001 SEQ ID NO: 3 |
| AAV CHt-P9 | 661 | WO2016065001 SEQ ID NO: 53 |
| AAV CKd-1 | 662 | U.S. Pat. No. 8,734,809 SEQ ID NO: 57 |
| AAV CKd-1 | 663 | U.S. Pat. No. 8,734,809 SEQ ID NO: 131 |
| AAV CKd-10 | 664 | U.S. Pat. No. 8,734,809 SEQ ID NO: 58 |
| AAV CKd-10 | 665 | U.S. Pat. No. 8,734,809 SEQ ID NO: 132 |
| AAV CKd-2 | 666 | U.S. Pat. No. 8,734,809 SEQ ID NO: 59 |
| AAV CKd-2 | 667 | U.S. Pat. No. 8,734,809 SEQ ID NO: 133 |
| AAV CKd-3 | 668 | U.S. Pat. No. 8,734,809 SEQ ID NO: 60 |
| AAV CKd-3 | 669 | U.S. Pat. No. 8,734,809 SEQ ID NO: 134 |
| AAV CKd-4 | 670 | U.S. Pat. No. 8,734,809 SEQ ID NO: 61 |
| AAV CKd-4 | 671 | U.S. Pat. No. 8,734,809 SEQ ID NO: 135 |
| AAV CKd-6 | 672 | U.S. Pat. No. 8,734,809 SEQ ID NO: 62 |
| AAV CKd-6 | 673 | U.S. Pat. No. 8,734,809 SEQ ID NO: 136 |
| AAV CKd-7 | 674 | U.S. Pat. No. 8,734,809 SEQ ID NO: 63 |
| AAV CKd-7 | 675 | U.S. Pat. No. 8,734,809 SEQ ID NO: 137 |
| AAV CKd-8 | 676 | U.S. Pat. No. 8,734,809 SEQ ID NO: 64 |
| AAV CKd-8 | 677 | U.S. Pat. No. 8,734,809 SEQ ID NO: 138 |
| AAV CKd-B1 | 678 | U.S. Pat. No. 8,734,809 SEQ ID NO: 73 |
| AAV CKd-B1 | 679 | U.S. Pat. No. 8,734,809 SEQ ID NO: 147 |
| AAV CKd-B2 | 680 | U.S. Pat. No. 8,734,809 SEQ ID NO: 74 |
| AAV CKd-B2 | 681 | U.S. Pat. No. 8,734,809 SEQ ID NO: 148 |
| AAV CKd-B3 | 682 | U.S. Pat. No. 8,734,809 SEQ ID NO: 75 |
| AAV CKd-B3 | 683 | U.S. Pat. No. 8,734,809 SEQ ID NO: 149 |
| AAV CKd-B4 | 684 | U.S. Pat. No. 8,734,809 SEQ ID NO: 76 |
| AAV CKd-B4 | 685 | U.S. Pat. No. 8,734,809 SEQ ID NO: 150 |
| AAV CKd-B5 (AAV CKd- | 686 | U.S. Pat. No. 8,734,809 SEQ ID NO: 77 |
| H6) | | |
| AAV CKd-B5 (AAV CKd- | 687 | U.S. Pat. No. 8,734,809 SEQ ID NO: 151 |
| H6) | | |
| AAV CKd-B6 | 688 | U.S. Pat. No. 8,734,809 SEQ ID NO: 78 |
| AAV CKd-B6 | 689 | U.S. Pat. No. 8,734,809 SEQ ID NO: 152 |
| AAV CKd-B7 | 690 | U.S. Pat. No. 8,734,809 SEQ ID NO: 79 |
| AAV CKd-B7 | 691 | U.S. Pat. No. 8,734,809 SEQ ID NO: 153 |
| AAV CKd-B8 | 692 | U.S. Pat. No. 8,734,809 SEQ ID NO: 80 |
| AAV CKd-B8 | 693 | U.S. Pat. No. 8,734,809 SEQ ID NO: 154 |
| AAV CKd-H1 | 694 | U.S. Pat. No. 8,734,809 SEQ ID NO: 81 |
| AAV CKd-H1 | 695 | U.S. Pat. No. 8,734,809 SEQ ID NO: 155 |
| AAV CKd-H2 | 696 | U.S. Pat. No. 8,734,809 SEQ ID NO: 82 |
| AAV CKd-H2 | 697 | U.S. Pat. No. 8,734,809 SEQ ID NO: 156 |
| AAV CKd-H3 | 698 | U.S. Pat. No. 8,734,809 SEQ ID NO: 83 |
| AAV CKd-H3 | 699 | U.S. Pat. No. 8,734,809 SEQ ID NO: 157 |
| AAV CKd-H4 | 700 | U.S. Pat. No. 8,734,809 SEQ ID NO: 84 |
| AAV CKd-H4 | 701 | U.S. Pat. No. 8,734,809 SEQ ID NO: 158 |
| AAV CKd-H5 | 702 | U.S. Pat. No. 8,734,809 SEQ ID NO: 85 |
| AAV CKd-H5 | 703 | U.S. Pat. No. 8,734,809 SEQ ID NO: 159 |
| AAV CKd-N3 | 704 | WO2016065001 SEQ ID NO: 12 |
| AAV CKd-N3 | 705 | WO2016065001 SEQ ID NO: 62 |
| AAV CKd-N4 | 706 | WO2016065001 SEQ ID NO: 13 |
| AAV CKd-N4 | 707 | WO2016065001 SEQ ID NO: 63 |
| AAV CKd-N9 | 708 | WO2016065001 SEQ ID NO: 14 |
| AAV CKd-N9 | 709 | WO2016065001 SEQ ID NO: 64 |
| AAV CLg-F1 | 710 | U.S. Pat. No. 8,734,809 SEQ ID NO: 39 |
| AAV CLg-F1 | 711 | U.S. Pat. No. 8,734,809 SEQ ID NO: 113 |
| AAV CLg-F2 | 712 | U.S. Pat. No. 8,734,809 SEQ ID NO: 40 |
| AAV CLg-F2 | 713 | U.S. Pat. No. 8,734,809 SEQ ID NO: 114 |
| AAV CLg-F3 | 714 | U.S. Pat. No. 8,734,809 SEQ ID NO: 41 |
| AAV CLg-F3 | 715 | U.S. Pat. No. 8,734,809 SEQ ID NO: 115 |
| AAV CLg-F4 | 716 | U.S. Pat. No. 8,734,809 SEQ ID NO: 42 |
| AAV CLg-F4 | 717 | U.S. Pat. No. 8,734,809 SEQ ID NO: 116 |
| AAV CLg-F5 (AAV CLg- | 718 | U.S. Pat. No. 8,734,809 SEQ ID NO: 43 |
| F6; AAV CLg-F8) | | |
| AAV CLg-F5 (AAV CLg- | 719 | U.S. Pat. No. 8,734,809 SEQ ID NO: 117 |
| F6; AAV CLg-F8) | | |
| AAV CLg-F7 | 720 | U.S. Pat. No. 8,734,809 SEQ ID NO: 44 |
| AAV CLg-F7 | 721 | U.S. Pat. No. 8,734,809 SEQ ID NO: 118 |
| AAV CLv-1 | 722 | U.S. Pat. No. 8,734,809 SEQ ID NO: 65 |
| AAV CLv-1 | 723 | U.S. Pat. No. 8,734,809 SEQ ID NO: 139 |
| AAV CLv1-1 | 724 | U.S. Pat. No. 8,734,809 SEQ ID NO: 171 |
| AAV Clv1-10 | 725 | U.S. Pat. No. 8,734,809 SEQ ID NO: 178 |
| AAV CLv1-2 | 726 | U.S. Pat. No. 8,734,809 SEQ ID NO: 172 |
| AAV CLv-12 | 727 | U.S. Pat. No. 8,734,809 SEQ ID NO: 66 |
| AAV CLv-12 | 728 | U.S. Pat. No. 8,734,809 SEQ ID NO: 140 |
| AAV CLv1-3 | 729 | U.S. Pat. No. 8,734,809 SEQ ID NO: 173 |
| AAV CLv-13 | 730 | U.S. Pat. No. 8,734,809 SEQ ID NO: 67 |
| AAV CLv-13 | 731 | U.S. Pat. No. 8,734,809 SEQ ID NO: 141 |
| AAV CLv1-4 | 732 | U.S. Pat. No. 8,734,809 SEQ ID NO: 174 |
| AAV Clv1-7 | 733 | U.S. Pat. No. 8,734,809 SEQ ID NO: 175 |
| AAV Clv1-8 | 734 | U.S. Pat. No. 8,734,809 SEQ ID NO: 176 |
| AAV Clv1-9 | 735 | U.S. Pat. No. 8,734,809 SEQ ID NO: 177 |
| AAV CLv-2 | 736 | U.S. Pat. No. 8,734,809 SEQ ID NO: 68 |
| AAV CLv-2 | 737 | U.S. Pat. No. 8,734,809 SEQ ID NO: 142 |
| AAV CLv-3 | 738 | U.S. Pat. No. 8,734,809 SEQ ID NO: 69 |
| AAV CLv-3 | 739 | U.S. Pat. No. 8,734,809 SEQ ID NO: 143 |
| AAV CLv-4 | 740 | U.S. Pat. No. 8,734,809 SEQ ID NO: 70 |
| AAV CLv-4 | 741 | U.S. Pat. No. 8,734,809 SEQ ID NO: 144 |
| AAV CLv-6 | 742 | U.S. Pat. No. 8,734,809 SEQ ID NO: 71 |
| AAV CLv-6 | 743 | U.S. Pat. No. 8,734,809 SEQ ID NO: 145 |
| AAV CLv-8 | 744 | U.S. Pat. No. 8,734,809 SEQ ID NO: 72 |
| AAV CLv-8 | 745 | U.S. Pat. No. 8,734,809 SEQ ID NO: 146 |
| AAV CLv-D1 | 746 | U.S. Pat. No. 8,734,809 SEQ ID NO: 22 |
| AAV CLv-D1 | 747 | U.S. Pat. No. 8,734,809 SEQ ID NO: 96 |
| AAV CLv-D2 | 748 | U.S. Pat. No. 8,734,809 SEQ ID NO: 23 |
| AAV CLv-D2 | 749 | U.S. Pat. No. 8,734,809 SEQ ID NO: 97 |
| AAV CLv-D3 | 750 | U.S. Pat. No. 8,734,809 SEQ ID NO: 24 |
| AAV CLv-D3 | 751 | U.S. Pat. No. 8,734,809 SEQ ID NO: 98 |
| AAV CLv-D4 | 752 | U.S. Pat. No. 8,734,809 SEQ ID NO: 25 |
| AAV CLv-D4 | 753 | U.S. Pat. No. 8,734,809 SEQ ID NO: 99 |
| AAV CLv-D5 | 754 | U.S. Pat. No. 8,734,809 SEQ ID NO: 26 |
| AAV CLv-D5 | 755 | U.S. Pat. No. 8,734,809 SEQ ID NO: 100 |
| AAV CLv-D6 | 756 | U.S. Pat. No. 8,734,809 SEQ ID NO: 27 |
| AAV CLv-D6 | 757 | U.S. Pat. No. 8,734,809 SEQ ID NO: 101 |
| AAV CLv-D7 | 758 | U.S. Pat. No. 8,734,809 SEQ ID NO: 28 |
| AAV CLv-D7 | 759 | U.S. Pat. No. 8,734,809 SEQ ID NO: 102 |
| AAV CLv-D8 | 760 | U.S. Pat. No. 8,734,809 SEQ ID NO: 29 |
| AAV CLv-D8 | 761 | U.S. Pat. No. 8,734,809 SEQ ID NO: 103 |
| AAV CLv-K1 | 762 | WO2016065001 SEQ ID NO: 18 |
| AAV CLv-K1 | 763 | WO2016065001 SEQ ID NO: 68 |
| AAV CLv-K3 | 764 | WO2016065001 SEQ ID NO: 19 |
| AAV CLv-K3 | 765 | WO2016065001 SEQ ID NO: 69 |
| AAV CLv-K6 | 766 | WO2016065001 SEQ ID NO: 20 |
| AAV CLv-K6 | 767 | WO2016065001 SEQ ID NO: 70 |
| AAV CLv-L4 | 768 | WO2016065001 SEQ ID NO: 15 |
| AAV CLv-L4 | 769 | WO2016065001 SEQ ID NO: 65 |
| AAV CLv-L5 | 770 | WO2016065001 SEQ ID NO: 16 |
| AAV CLv-L5 | 771 | WO2016065001 SEQ ID NO: 66 |
| AAV CLv-L6 | 772 | WO2016065001 SEQ ID NO: 17 |
| AAV CLv-L6 | 773 | WO2016065001 SEQ ID NO: 67 |
| AAV CLv-M1 | 774 | WO2016065001 SEQ ID NO: 21 |
| AAV CLv-M1 | 775 | WO2016065001 SEQ ID NO: 71 |
| AAV CLv-M11 | 776 | WO2016065001 SEQ ID NO: 22 |
| AAV CLv-M11 | 777 | WO2016065001 SEQ ID NO: 72 |
| AAV CLv-M2 | 778 | WO2016065001 SEQ ID NO: 23 |
| AAV CLv-M2 | 779 | WO2016065001 SEQ ID NO: 73 |
| AAV CLv-M5 | 780 | WO2016065001 SEQ ID NO: 24 |
| AAV CLv-M5 | 781 | WO2016065001 SEQ ID NO: 74 |
| AAV CLv-M6 | 782 | WO2016065001 SEQ ID NO: 25 |
| AAV CLv-M6 | 783 | WO2016065001 SEQ ID NO: 75 |
| AAV CLv-M7 | 784 | WO2016065001 SEQ ID NO: 26 |
| AAV CLv-M7 | 785 | WO2016065001 SEQ ID NO: 76 |
| AAV CLv-M8 | 786 | WO2016065001 SEQ ID NO: 27 |
| AAV CLv-M8 | 787 | WO2016065001 SEQ ID NO: 77 |
| AAV CLv-M9 | 788 | WO2016065001 SEQ ID NO: 28 |
| AAV CLv-M9 | 789 | WO2016065001 SEQ ID NO: 78 |
| AAV CLv-R1 | 790 | U.S. Pat. No. 8,734,809 SEQ ID NO: 30 |
| AAV CLv-R1 | 791 | U.S. Pat. No. 8,734,809 SEQ ID NO: 104 |
| AAV CLv-R2 | 792 | U.S. Pat. No. 8,734,809 SEQ ID NO: 31 |
| AAV CLv-R2 | 793 | U.S. Pat. No. 8,734,809 SEQ ID NO: 105 |
| AAV CLv-R3 | 794 | U.S. Pat. No. 8,734,809 SEQ ID NO: 32 |
| AAV CLv-R3 | 795 | U.S. Pat. No. 8,734,809 SEQ ID NO: 106 |
| AAV CLv-R4 | 796 | U.S. Pat. No. 8,734,809 SEQ ID NO: 33 |
| AAV CLv-R4 | 797 | U.S. Pat. No. 8,734,809 SEQ ID NO: 107 |
| AAV CLv-R5 | 798 | U.S. Pat. No. 8,734,809 SEQ ID NO: 34 |
| AAV CLv-R5 | 799 | U.S. Pat. No. 8,734,809 SEQ ID NO: 108 |
| AAV CLv-R6 | 800 | U.S. Pat. No. 8,734,809 SEQ ID NO: 35 |
| AAV CLv-R6 | 801 | U.S. Pat. No. 8,734,809 SEQ ID NO: 109 |
| AAV CLv-R7 | 802 | U.S. Pat. No. 8,734,809 SEQ ID NO: 36 |
| AAV CLv-R7 | 803 | U.S. Pat. No. 8,734,809 SEQ ID NO: 110 |
| AAV CLv-R8 | 804 | U.S. Pat. No. 8,734,809 SEQ ID NO: 37 |
| AAV CLv-R8 | 805 | U.S. Pat. No. 8,734,809 SEQ ID NO: 111 |
| AAV CLv-R9 | 806 | U.S. Pat. No. 8,734,809 SEQ ID NO: 38 |
| AAV CLv-R9 | 807 | U.S. Pat. No. 8,734,809 SEQ ID NO: 112 |
| AAV CSp-1 | 808 | U.S. Pat. No. 8,734,809 SEQ ID NO: 45 |
| AAV CSp-1 | 809 | U.S. Pat. No. 8,734,809 SEQ ID NO: 119 |
| AAV CSp-10 | 810 | U.S. Pat. No. 8,734,809 SEQ ID NO: 46 |
| AAV CSp-10 | 811 | U.S. Pat. No. 8,734,809 SEQ ID NO: 120 |
| AAV CSp-11 | 812 | U.S. Pat. No. 8,734,809 SEQ ID NO: 47 |
| AAV CSp-11 | 813 | U.S. Pat. No. 8,734,809 SEQ ID NO: 121 |
| AAV CSp-2 | 814 | U.S. Pat. No. 8,734,809 SEQ ID NO: 48 |
| AAV CSp-2 | 815 | U.S. Pat. No. 8,734,809 SEQ ID NO: 122 |
| AAV CSp-3 | 816 | U.S. Pat. No. 8,734,809 SEQ ID NO: 49 |
| AAV CSp-3 | 817 | U.S. Pat. No. 8,734,809 SEQ ID NO: 123 |
| AAV CSp-4 | 818 | U.S. Pat. No. 8,734,809 SEQ ID NO: 50 |
| AAV CSp-4 | 819 | U.S. Pat. No. 8,734,809 SEQ ID NO: 124 |
| AAV CSp-6 | 820 | U.S. Pat. No. 8,734,809 SEQ ID NO: 51 |
| AAV CSp-6 | 821 | U.S. Pat. No. 8,734,809 SEQ ID NO: 125 |
| AAV CSp-7 | 822 | U.S. Pat. No. 8,734,809 SEQ ID NO: 52 |
| AAV CSp-7 | 823 | U.S. Pat. No. 8,734,809 SEQ ID NO: 126 |
| AAV CSp-8 | 824 | U.S. Pat. No. 8,734,809 SEQ ID NO: 53 |
| AAV CSp-8 | 825 | U.S. Pat. No. 8,734,809 SEQ ID NO: 127 |
| AAV CSp-8.10 | 826 | WO2016065001 SEQ ID NO: 38 |
| AAV CSp-8.10 | 827 | WO2016065001 SEQ ID NO: 88 |
| AAV CSp-8.2 | 828 | WO2016065001 SEQ ID NO: 39 |
| AAV CSp-8.2 | 829 | WO2016065001 SEQ ID NO: 89 |
| AAV CSp-8.4 | 830 | WO2016065001 SEQ ID NO: 40 |
| AAV CSp-8.4 | 831 | WO2016065001 SEQ ID NO: 90 |
| AAV CSp-8.5 | 832 | WO2016065001 SEQ ID NO: 41 |
| AAV CSp-8.5 | 833 | WO2016065001 SEQ ID NO: 91 |
| AAV CSp-8.6 | 834 | WO2016065001 SEQ ID NO: 42 |
| AAV CSp-8.6 | 835 | WO2016065001 SEQ ID NO: 92 |
| AAV CSp-8.7 | 836 | WO2016065001 SEQ ID NO: 43 |
| AAV CSp-8.7 | 837 | WO2016065001 SEQ ID NO: 93 |
| AAV CSp-8.8 | 838 | WO2016065001 SEQ ID NO: 44 |
| AAV CSp-8.8 | 839 | WO2016065001 SEQ ID NO: 94 |
| AAV CSp-8.9 | 840 | WO2016065001 SEQ ID NO: 45 |
| AAV CSp-8.9 | 841 | WO2016065001 SEQ ID NO: 95 |
| AAV CSp-9 | 842 | U.S. Pat. No. 8,734,809 SEQ ID NO: 54 |
| AAV CSp-9 | 843 | U.S. Pat. No. 8,734,809 SEQ ID NO: 128 |
| AAV.hu.48R3 | 844 | U.S. Pat. No. 8,734,809 SEQ ID NO: 183 |
| AAV.VR-355 | 845 | U.S. Pat. No. 8,734,809 SEQ ID NO: 181 |
| AAV3B | 846 | WO2016065001 SEQ ID NO: 48 |
| AAV3B | 847 | WO2016065001 SEQ ID NO: 98 |
| AAV4 | 848 | WO2016065001 SEQ ID NO: 49 |
| AAV4 | 849 | WO2016065001 SEQ ID NO: 99 |
| AAV5 | 850 | WO2016065001 SEQ ID NO: 50 |
| AAV5 | 851 | WO2016065001 SEQ ID NO: 100 |
| AAVF1/HSC1 | 852 | WO2016049230 SEQ ID NO: 20 |
| AAVF1/HSC1 | 853 | WO2016049230 SEQ ID NO: 2 |
| AAVF11/HSC11 | 854 | WO2016049230 SEQ ID NO: 26 |
| AAVF11/HSC11 | 855 | WO2016049230 SEQ ID NO: 4 |
| AAVF12/HSC12 | 856 | WO2016049230 SEQ ID NO: 30 |
| AAVF12/HSC12 | 857 | WO2016049230 SEQ ID NO: 12 |
| AAVF13/HSC13 | 858 | WO2016049230 SEQ ID NO: 31 |
| AAVF13/HSC13 | 859 | WO2016049230 SEQ ID NO: 14 |
| AAVF14/HSC14 | 860 | WO2016049230 SEQ ID NO: 32 |
| AAVF14/HSC14 | 861 | WO2016049230 SEQ ID NO: 15 |
| AAVF15/HSC15 | 862 | WO2016049230 SEQ ID NO: 33 |
| AAVF15/HSC15 | 863 | WO2016049230 SEQ ID NO: 16 |
| AAVF16/HSC16 | 864 | WO2016049230 SEQ ID NO: 34 |
| AAVF16/HSC16 | 865 | WO2016049230 SEQ ID NO: 17 |
| AAVF17/HSC17 | 866 | WO2016049230 SEQ ID NO: 35 |
| AAVF17/HSC17 | 867 | WO2016049230 SEQ ID NO: 13 |
| AAVF2/HSC2 | 868 | WO2016049230 SEQ ID NO: 21 |
| AAVF2/HSC2 | 869 | WO2016049230 SEQ ID NO: 3 |
| AAVF3/HSC3 | 870 | WO2016049230 SEQ ID NO: 22 |
| AAVF3/HSC3 | 871 | WO2016049230 SEQ ID NO: 5 |
| AAVF4/HSC4 | 872 | WO2016049230 SEQ ID NO: 23 |
| AAVF4/HSC4 | 873 | WO2016049230 SEQ ID NO: 6 |
| AAVF5/HSC5 | 874 | WO2016049230 SEQ ID NO: 25 |
| AAVF5/HSC5 | 875 | WO2016049230 SEQ ID NO: 11 |
| AAVF6/HSC6 | 876 | WO2016049230 SEQ ID NO: 24 |
| AAVF6/HSC6 | 877 | WO2016049230 SEQ ID NO: 7 |
| AAVF7/HSC7 | 878 | WO2016049230 SEQ ID NO: 27 |
| AAVF7/HSC7 | 879 | WO2016049230 SEQ ID NO: 8 |
| AAVF8/HSC8 | 880 | WO2016049230 SEQ ID NO: 28 |
| AAVF8/HSC8 | 881 | WO2016049230 SEQ ID NO: 9 |
| AAVF9/HSC9 | 882 | WO2016049230 SEQ ID NO: 29 |
| AAVF9/HSC9 | 883 | WO2016049230 SEQ ID NO: 10 |

[0104] Each of the patents, applications and/or publications listed in Table 1 are hereby incorporated by reference in their entirety.

[0105] In one embodiment, the AAV particle may be engineered to comprise at least one AAV capsid CD8+ T-cell epitope. Hui et al. (Molecular Therapy—Methods & Clinical Development (2015) 2, 15029 doi:10.1038/mtm.2015.29; the contents of which are herein incorporated by reference in their entirety) identified AAV capsid-specific CD8+ T-cell epitopes for AAV1 and AAV2 (see e.g., Table 2 in the publication). As a non-limiting example, the capsid-specific CD8+ T-cell epitope may be for an AAV2 serotype. As a non-limiting example, the capsid-specific CD8+ T-cell epitope may be for an AAV1 serotype.

[0106] In one embodiment, the AAV particle may be engineered to comprise at least one AAV capsid CD8+ T-cell epitope for AAV2 such as, but not limited to, SADNNNSEY (SEQ ID NO: 884), LIDQYLYYL (SEQ ID NO: 885), VPQYGYLTL (SEQ ID NO: 886), TTSTRTWAL (SEQ ID NO: 887), YHLNGRDSL (SEQ ID NO: 888), SQAVGRSSF (SEQ ID NO: 889), VPANPSTTF (SEQ ID NO: 890), FPQSGVLIF (SEQ ID NO: 891), YFDFNRFHCHFSPRD (SEQ ID NO: 892), VGNSSGNWHCDSTWM (SEQ ID NO: 893), QFSQAGASDIRDQSR (SEQ ID NO: 894), GASDIRQSRNWLP (SEQ ID NO: 895) and GNRQAATADVNTQGV (SEQ ID NO: 896).

[0107] In one embodiment, the AAV particle may be engineered to comprise at least one AAV capsid CD8+ T-cell epitope for AAV1 such as, but not limited to, LDRLMNPLI (SEQ ID NO: 897), TTSTRTWAL (SEQ ID NO: 887), and QPAKKRLNF (SEQ ID NO: 898).

[0108] In one embodiment, peptides for inclusion in an AAV particle may be identified using the methods described by Hui et al. (Molecular Therapy—Methods & Clinical Development (2015) 2, 15029 doi:10.1038/mtm.2015.29; the contents of which are herein incorporated by reference in their entirety). As a non-limiting example, the procedure includes isolating human splenocytes, restimulating the splenocytes in vitro using individual peptides spanning the amino acid sequence of the AAV capsid protein, IFN-gamma ELISpot with the individual peptides used for the in vitro restimulation, bioinformatics analysis to determine the HLA restriction of 15-mers identified by IFN-gamma ELISpot, identification of candidate reactive 9-mer epitopes for a given HLA allele, synthesis candidate 9-mers, second IFN-gamma ELISpot screening of splenocytes from subjects carrying the HLA alleles to which identified AAV epitopes are predicted to bind, determine the AAV capsid-reactive CD8+ T cell epitopes and determine the frequency of subjects reacting to a given AAV epitope.

[0109] In one embodiment, peptides for inclusion in an AAV particle may be identified by isolating human splenocytes, restimulating the splenocytes in vitro using individual peptides spanning the amino acid sequence of the AAV capsid protein, IFN-gamma ELISpot with the individual peptides used for the in vitro restimulation, bioinformatics analysis to determine the given allele restriction of 15-mers identified by IFN-gamma ELISpot, identification of candidate reactive 9-mer epitopes for a given allele, synthesis candidate 9-mers, second IFN-gamma ELISpot screening of splenocytes from subjects carrying the specific alleles to which identified AAV epitopes are predicted to bind, determine the AAV capsid-reactive CD8+ T cell epitopes and determine the frequency of subjects reacting to a given AAV epitope.

### AAV Vectors and Capsids

[0110] The present disclosure also provides nucleic acids encoding the mutated or modified virus capsids and capsid proteins. In some embodiments the capsids are engineered according to the methods of International Publication No. WO2015191508, the contents of which are incorporated herein by reference in their entirety and by methods known in the art.

[0111] Further provided are vectors comprising the nucleic acids, and cells (in vivo or in culture) comprising the nucleic acids and/or vectors. Suitable vectors include without limitation viral vectors (e.g., adenovirus, AAV, herpes virus, vaccinia, poxviruses, baculoviruses, and the like), plasmids, phage, YACs, BACs, and the like as are well known in the art. Such nucleic acids, vectors and cells can be used, for example, as reagents (e.g., helper packaging constructs or packaging cells) for the production of modified virus capsids or virus vectors as described herein.

[0112] The molecules which contain AAV sequences include any genetic element (vector) which may be delivered to a host cell, e.g., naked DNA, a plasmid, phage, transposon, cosmid, episome, a protein in a non-viral delivery vehicle (e.g., a lipid-based carrier), virus, etc., which transfers the sequences carried thereon. The selected vector may be delivered by any suitable method, including transfection, electroporation, liposome delivery, membrane fusion techniques, high velocity DNA-coated pellets, viral infection and protoplast fusion. The methods used to construct any embodiment of this disclosure are known to those with skill in nucleic acid manipulation and include genetic engineering, recombinant engineering, and synthetic techniques. (See, e.g., Sambrook et al., Molecular Cloning: A Laboratory Manual, Cold Spring Harbor Press, Cold Spring Harbor, N.Y.).

[0113] The transgene or payload can be carried on any suitable vector, e.g., a plasmid, which is delivered to a host cell. The plasmids useful in this disclosure may be engineered such that they are suitable for replication and, optionally, integration in prokaryotic cells, mammalian cells, or both. These plasmids contain sequences permitting replication of the transgene in eukaryotes and/or prokaryotes and selection markers for these systems. Selectable markers or reporter genes may include sequences encoding geneticin, hygromicin or purimycin resistance, among others. The plasmids may also contain certain selectable reporters or marker genes that can be used to signal the presence of the vector in bacterial cells, such as ampicillin resistance. Other components of the plasmid may include an origin of replication and an amplicon, such as the amplicon system employing the Epstein Barr virus nuclear antigen. This amplicon system, or other similar amplicon components permit high copy episomal replication in the cells. Preferably, the molecule carrying the transgene or payload is transfected into the cell, where it may exist transiently. Alternatively, the transgene may be stably integrated into the genome of the host cell, either chromosomally or as an episome. In certain embodiments, the transgene may be present in multiple copies, optionally in head-to-head, head-to-tail, or tail-to-tail concatamers. Suitable transfection techniques are known and may readily be utilized to deliver the transgene to the host cell.

### Promoters

[0114] A person skilled in the art may recognize that a target cell may require a specific promoter including but not limited to a promoter that is species specific, inducible, tissue-specific, or cell cycle-specific Parr et al., Nat. Med.3:1145-9 (1997); the contents of which are herein incorporated by reference in their entirety.

[0115] In one embodiment, the promoter is deemed to be efficient for the AADC polynucleotide.

[0116] In one embodiment, the promoter is deemed to be efficient when it drives expression of the polypeptide(s) encoded in the payload region of the viral genome of the AAV particle.

[0117] In one embodiment, the promoter is deemed to be efficient for the cell being targeted.

[0118] In one embodiment, the promoter provides expression of a payload described herein for a period of time in targeted tissues. As a non-limiting example, expression driven by a promoter may be for nervous system tissues. Expression may be for a period of 1 hour, 2, hours, 3 hours, 4 hours, 5 hours, 6 hours, 7 hours, 8 hours, 9 hours, 10 hours, 11 hours, 12 hours, 13 hours, 14 hours, 15 hours, 16 hours, 17 hours, 18 hours, 19 hours, 20 hours, 21 hours, 22 hours, 23 hours, 1 day, 2 days, 3 days, 4 days, 5 days, 6 days, 1 week, 8 days, 9 days, 10 days, 11 days, 12 days, 13 days, 2 weeks, 15 days, 16 days, 17 days, 18 days, 19 days, 20 days, 3 weeks, 22 days, 23 days, 24 days, 25 days, 26 days, 27 days, 28 days, 29 days, 30 days, 31 days, 1 month, 2 months, 3 months, 4 months, 5 months, 6 months, 7 months, 8 months, 9 months, 10 months, 11 months, 1 year, 13 months, 14 months, 15 months, 16 months, 17 months, 18 months, 19 months, 20 months, 21 months, 22 months, 23 months, 2 years, 3 years, 4 years, 5 years, 6 years, 7 years, 8 years, 9 years, 10 years or more than 10 years. Expression may be for 1-5 hours, 1-12 hours, 1-2 days, 1-5 days, 1-2 weeks, 1-3 weeks, 1-4 weeks, 1-2 months, 1-4 months, 1-6 months, 2-6 months, 3-6 months, 3-9 months, 4-8 months, 6-12 months, 1-2 years, 1-5 years, 2-5 years, 3-6 years, 3-8 years, 4-8 years or 5-10 years. As a non-limiting example, the promoter is a promoter for sustained expression in nervous system tissue such as, but not limited to, neuronal tissue and glial tissue.

[0119] In one embodiment, the promoter is a promoter which provides expression of a payload described herein for at least 1 month, 2 months, 3 months, 4 months, 5 months, 6 months, 7 months, 8 months, 9 months, 10 months, 11 months, 1 year, 2 years, 3 years 4 years, 5 years, 6 years, 7 years, 8 years, 9 years, 10 years, 11 years, 12 years, 13 years, 14 years, 15 years, 16 years, 17 years, 18 years, 19 years, 20 years, 21 years, 22 years, 23 years, 24 years, 25 years, 26 years, 27 years, 28 years, 29 years, 30 years, 31 years, 32 years, 33 years, 34 years, 35 years, 36 years, 37 years, 38 years, 39 years, 40 years, 41 years, 42 years, 43 years, 44 years, 45 years, 46 years, 47 years, 48 years, 49 years, 50 years, 55 years, 60 years, 65 years, or more than 65 years.

[0120] In one embodiment, the FRDA promoter is used with the AADC polynucleotides described herein.

[0121] In one embodiment, there is a region located approximately ˜5 kb upstream of the first exon of the payload. As a non-limiting example, there is a 17 bp region located approximately 4.9 kb upstream of the first exon of the frataxin gene in order to allow for expression with the FRDA promoter (See e.g., Puspasari et al. Long Range Regulation of Human FXN Gene Expression, PLOS ONE, 2011; the contents of which are herein incorporated by reference in their entirety).

[0122] Promoters may be naturally occurring or non-naturally occurring. Non-limiting examples of promoters include viral promoters, plant promoters and mammalian promoters. In some embodiments, the promoters may be human promoters. In some embodiments, the promoter may be truncated.

[0123] Promoters which drive or promote expression in most tissues include, but are not limited to, human elongation factor 1α-subunit (EF1α), cytomegalovirus (CMV) immediate-early enhancer and/or promoter, chicken β-actin (CBA) and its derivative CAG, 0 glucuronidase (GUSB), or ubiquitin C (UBC). Tissue-specific expression elements can be used to restrict expression to certain cell types such as, but not limited to, muscle specific promoters, B cell promoters, monocyte promoters, leukocyte promoters, macrophage promoters, pancreatic acinar cell promoters, endothelial cell promoters, lung tissue promoters, astrocyte promoters, or nervous system promoters which can be used to restrict expression to neurons, astrocytes, or oligodendrocytes.

[0124] Non-limiting examples of muscle-specific promoters include mammalian muscle creatine kinase (MCK) promoter, mammalian desmin (DES) promoter, mammalian troponin I (TNNI2) promoter, and mammalian skeletal alpha-actin (ASKA) promoter (see, e.g. U.S. Patent Publication US 20110212529, the contents of which are herein incorporated by reference in their entirety)

[0125] Non-limiting examples of tissue-specific expression elements for neurons include neuron-specific enolase (NSE), platelet-derived growth factor (PDGF), platelet-derived growth factor B-chain (PDGF-β), synapsin (Syn), methyl-CpG binding protein 2 (MeCP2), Ca²⁺/calmodulin-dependent protein kinase II (CaMKII), metabotropic glutamate receptor 2 (mGluR2), neurofilament light (NFL) or heavy (NFH), β-globin minigene nβ2, preproenkephalin (PPE), enkephalin (Enk) and excitatory amino acid transporter 2 (EAAT2) promoters. Non-limiting examples of tissue-specific expression elements for astrocytes include glial fibrillary acidic protein (GFAP) and EAAT2 promoters. A non-limiting example of a tissue-specific expression element for oligodendrocytes includes the myelin basic protein (MBP) promoter.

[0126] In one embodiment, the promoter may be less than 1 kb. The promoter may have a length of 200, 210, 220, 230, 240, 250, 260, 270, 280, 290, 300, 310, 320, 330, 340, 350, 360, 370, 380, 390, 400, 410, 420, 430, 440, 450, 460, 470, 480, 490, 500, 510, 520, 530, 540, 550, 560, 570, 580, 590, 600, 610, 620, 630, 640, 650, 660, 670, 680, 690, 700, 710, 720, 730, 740, 750, 760, 770, 780, 790, 800 or more than 800 nucleotides. The promoter may have a length between 200-300, 200-400, 200-500, 200-600, 200-700, 200-800, 300-400, 300-500, 300-600, 300-700, 300-800, 400-500, 400-600, 400-700, 400-800, 500-600, 500-700, 500-800, 600-700, 600-800 or 700-800.

[0127] In one embodiment, the promoter may be a combination of two or more components of the same or different starting or parental promoters such as, but not limited to, CMV and CBA. Each component may have a length of 200, 210, 220, 230, 240, 250, 260, 270, 280, 290, 300, 310, 320, 330, 340, 350, 360, 370, 380, 381, 382, 383, 384, 385, 386, 387, 388, 389, 390, 400, 410, 420, 430, 440, 450, 460, 470, 480, 490, 500, 510, 520, 530, 540, 550, 560, 570, 580, 590, 600, 610, 620, 630, 640, 650, 660, 670, 680, 690, 700, 710, 720, 730, 740, 750, 760, 770, 780, 790, 800 or more than 800. Each component may have a length between 200-300, 200-400, 200-500, 200-600, 200-700, 200-800, 300-400, 300-500, 300-600, 300-700, 300-800, 400-500, 400-600, 400-700, 400-800, 500-600, 500-700, 500-800, 600-700, 600-800 or 700-800. In one embodiment, the promoter is a combination of a 382 nucleotide CMV-enhancer sequence and a 260 nucleotide CBA-promoter sequence.

[0128] In one embodiment, the viral genome comprises a ubiquitous promoter. Non-limiting examples of ubiquitous promoters include CMV, CBA (including derivatives CAG, CBh, etc.), EF-1α, PGK, UBC, GUSB (hGBp), and UCOE (promoter of HNRPA2B1-CBX3).

[0129] Yu et al. (Molecular Pain 2011, 7:63; the contents of which are herein incorporated by reference in their entirety) evaluated the expression of eGFP under the CAG, EFIa, PGK and UBC promoters in rat DRG cells and primary DRG cells using lentiviral vectors and found that UBC showed weaker expression than the other 3 promoters and only 10-12% glial expression was seen for all promoters. Soderblom et al. (E. Neuro 2015; the contents of which are herein incorporated by reference in their entirety) evaluated the expression of eGFP in AAV8 with CMV and UBC promoters and AAV2 with the CMV promoter after injection in the motor cortex. Intranasal administration of a plasmid containing a UBC or EFIa promoter showed a sustained airway expression greater than the expression with the CMV promoter (See e.g., Gill et al., Gene Therapy 2001, Vol. 8, 1539-1546; the contents of which are herein incorporated by reference in their entirety). Husain et al. (Gene Therapy 2009; the contents of which are herein incorporated by reference in their entirety) evaluated a HβH construct with a hGUSB promoter, a HSV-1LAT promoter and a NSE promoter and found that the HβH construct showed weaker expression than NSE in mouse brain. Passini and Wolfe (J. Virol. 2001, 12382-12392, the contents of which are herein incorporated by reference in their entirety) evaluated the long term effects of the HβH vector following an intraventricular injection in neonatal mice and found that there was sustained expression for at least 1 year. Low expression in all brain regions was found by Xu et al. (Gene Therapy 2001, 8, 1323-1332; the contents of which are herein incorporated by reference in their entirety) when NFL and NFH promoters were used as compared to the CMV-lacZ, CMV-luc, EF, GFAP, hENK, nAChR, PPE, PPE+wpre, NSE (0.3 kb), NSE (1.8 kb) and NSE (1.8 kb+wpre). Xu et al. found that the promoter activity in descending order was NSE (1.8 kb), EF, NSE (0.3 kb), GFAP, CMV, hENK, PPE, NFL and NFH. NFL is a 650 nucleotide promoter and NFH is a 920 nucleotide promoter which are both absent in the liver but NFH is abundant in the sensory proprioceptive neurons, brain and spinal cord and NFH is present in the heart. Scn8a is a 470 nucleotide promoter which expresses throughout the DRG, spinal cord and brain with particularly high expression seen in the hippocampal neurons and cerebellar Purkinje cells, cortex, thalamus and hypothalamus (See e.g., Drews et al. Identification of evolutionary conserved, functional noncoding elements in the promoter region of the sodium channel gene SCN8A, Mamm Genome (2007) 18:723-731; and Raymond et al. Expression of Alternatively Spliced Sodium Channel α-subunit genes, Journal of Biological Chemistry (2004) 279(44) 46234-46241; the contents of each of which are herein incorporated by reference in their entireties).

[0130] Any of promoters taught by the aforementioned Yu, Soderblom, Gill, Husain, Passini, Xu, Drews or Raymond may be used in the present inventions.

[0131] In one embodiment, the promoter is not cell specific.

[0132] In one embodiment, the promoter is an ubiquitin c (UBC) promoter. The UBC promoter may have a size of 300-350 nucleotides. As a non-limiting example, the UBC promoter is 332 nucleotides.

[0133] In one embodiment, the promoter is a 3-glucuronidase (GUSB) promoter. The GUSB promoter may have a size of 350-400 nucleotides. As a non-limiting example, the GUSB promoter is 378 nucleotides.

[0134] In one embodiment, the promoter is a neurofilament light (NFL) promoter. The NFL promoter may have a size of 600-700 nucleotides. As a non-limiting example, the NFL promoter is 650 nucleotides.

[0135] In one embodiment, the promoter is a neurofilament heavy (NFH) promoter. The NFH promoter may have a size of 900-950 nucleotides. As a non-limiting example, the NFH promoter is 920 nucleotides.

[0136] In one embodiment, the promoter is a scn8a promoter. The scn8a promoter may have a size of 450-500 nucleotides. As a non-limiting example, the scn8a promoter is 470 nucleotides.

[0137] In one embodiment, the promoter is a phosphoglycerate kinase 1 (PGK) promoter.

[0138] In one embodiment, the promoter is a chicken β-actin (CBA) promoter.

[0139] In one embodiment, the promoter is a cytomegalovirus (CMV) promoter.

[0140] In one embodiment, the promoter is a neuronal cell targeting promoter. A non-limiting example of a neuronal targeting promoter is a synapsin-1 promoter.

[0141] In one embodiment, the promoter is a liver or a skeletal muscle promoter. Non-limiting examples of liver promoters include human α-1-antitrypsin (hAAT) and thyroxine binding globulin (TBG). Non-limiting examples of skeletal muscle promoters include Desmin, MCK or synthetic C5-12.

[0142] In one embodiment, the promoter is a RNA pol III promoter. As a non-limiting example, the RNA pol III promoter is U6. As a non-limiting example, the RNA pol III promoter is H1.

[0143] In one embodiment, the viral genome comprises two promoters. As a non-limiting example, the promoters are an EF1α promoter and a CMV promoter.

[0144] In one embodiment, the viral genome comprises an enhancer element, a promoter and/or a 5′UTR intron. The enhancer element, also referred to herein as an “enhancer,” may be, but is not limited to, a CMV enhancer, the promoter may be, but is not limited to, a CMV, CBA, UBC, GUSB, NSE, Synapsin, MeCP2, and GFAP promoter and the 5′UTR/intron may be, but is not limited to, SV40, and CBA-MVM. As a non-limiting example, the enhancer, promoter and/or intron used in combination may be: (1) CMV enhancer, CMV promoter, SV40 5′UTR intron; (2) CMV enhancer, CBA promoter, SV 40 5′UTR intron; (3) CMV enhancer, CBA promoter, CBA-MVM 5′UTR intron; (4) UBC promoter; (5) GUSB promoter; (6) NSE promoter; (7) Synapsin promoter; (8) MeCP2 promoter and (9) GFAP promoter.

[0145] In one embodiment, the viral genome comprises an engineered promoter.

[0146] In another embodiment the viral genome comprises a promoter from a naturally expressed protein.

### Introns

[0147] In one embodiment, at least one element may be used with the AADC polynucleotides described herein to enhance the transgene target specificity and expression (See e.g., Powell et al. Viral Expression Cassette Elements to Enhance Transgene Target Specificity and Expression in Gene Therapy, 2015; the contents of which are herein incorporated by reference in their entirety) such as an intron. Non-limiting examples of introns include, MVM (67-97 bps), F.IX truncated intron 1 (300 bps), 3-globin SD/immunoglobulin heavy chain splice acceptor (250 bps), adenovirus splice donor/immunoglobin splice acceptor (500 bps), SV40 late splice donor/splice acceptor (19S/16S) (180 bps) and hybrid adenovirus splice donor/IgG splice acceptor (230 bps).

[0148] In one embodiment, the intron may be 100-500 nucleotides in length. The intron may have a length of 80, 90, 100, 110, 120, 130, 140, 150, 160, 170, 171, 172, 173, 174, 175, 176, 177, 178, 179, 180, 190, 200, 210, 220, 230, 240, 250, 260, 270, 280, 290, 300, 310, 320, 330, 340, 350, 360, 370, 380, 390, 400, 410, 420, 430, 440, 450, 460, 470, 480, 490 or 500. The intron may have a length between 80-100, 80-120, 80-140, 80-160, 80-180, 80-200, 80-250, 80-300, 80-350, 80-400, 80-450, 80-500, 200-300, 200-400, 200-500, 300-400, 300-500, or 400-500.

### Functional Payloads

[0149] A payload may comprise a gene therapy product. A gene therapy product may comprise a polypeptide, RNA molecule, or other gene product that, when expressed in a target cell, provides a desired therapeutic effect. In some embodiments, a gene therapy product may comprise a substitute for a non-functional gene that is absent or mutated.

[0150] An AAV payload construct encoding a payload may comprise a selectable marker. A selectable marker may comprise a gene sequence or a protein encoded by that gene sequence expressed in a host cell that allows for the identification, selection, and/or purification of the host cell from a population of cells that may or may not express the selectable marker. In one embodiment the selectable marker provides resistance to survive a selection process that would otherwise kill the host cell, such as treatment with an antibiotic. In some embodiments an antibiotic selectable marker may comprise one or more antibiotic resistance factors, including but not limited to neomycin resistance (e.g., neo), hygromycin resistance, kanamycin resistance, and/or puromycin resistance.

[0151] In some embodiments a selectable marker may comprise a cell-surface marker, such as any protein expressed on the surface of the cell including, but not limited to receptors, CD markers, lectins, integrins, or truncated versions thereof. In some embodiments, cells that comprise a cell-surface marker may be selected using an antibody targeted to said cell-surface marker. In some embodiments an antibody targeted to the cell-surface marker may be directly conjugated with a selection agent including, but not limited to a fluorophore, sepharose, or magnetic bead. In some embodiments an antibody targeted to the cell-surface marker may be detected using a secondary labeled antibody or substrate which binds to the antibody targeted to the cell-surface marker. In some embodiments, a selectable marker may comprise negative selection by using an enzyme, including but not limited to Herpes simplex virus thymidine kinase (HSVTK) that converts a pro-toxin (gancyclovir) into a toxin or bacterial Cytosine Deaminase (CD) which converts the pro-toxin 5′-fluorocytosine (5′-FC) into the toxin 5′-fluorouracil (5′-FU). In some embodiments, any nucleic acid sequence encoding a polypeptide can be used as a selectable marker comprising recognition by a specific antibody.

[0152] In some embodiments, a payload construct encoding a payload may comprise a selectable marker including, but not limited to, β-lactamase, luciferase, β-galactosidase, or any other reporter gene as that term is understood in the art, including cell-surface markers, such as CD4 or the truncated nerve growth factor (NGFR) (for GFP, see WO 96/23810; Heim et al., Current Biology 2:178-182 (1996); Heim et al., Proc. Natl. Acad. Sci. USA (1995); or Heim et al., Science 373:663-664 (1995); for β-lactamase, see WO 96/30540). In some embodiments, a nucleic acid encoding a selectable marker may comprise a fluorescent protein. A fluorescent protein as herein described may comprise any fluorescent marker including but not limited to green, yellow, and/or red fluorescent protein (GFP, YFP, and/or RFP).

[0153] In accordance with the invention, a payload comprising a nucleic acid for expression in a target cell will be incorporated into the viral particle produced in the viral replication cell where said payload is located between two ITR sequences, or is located on either side of an asymmetrical ITR engineered with two D regions.

[0154] An AAV payload construct encoding one or more payloads for expression in a target cell may comprise one or more payload or non-payload nucleotide sequences operably linked to at least one target cell-compatible promoter. A person skilled in the art may recognize that a target cell may require a specific promoter including but not limited to a promoter that is species specific, inducible, tissue-specific, or cell cycle-specific Parr et al., Nat. Med.3:1145-9 (1997).

### Viral Production

[0155] The present disclosure provides a method for the generation of parvoviral particles, e.g. AAV particles, by viral genome replication in a viral replication cell comprising contacting the viral replication cell with an AAV polynucleotide or AAV genome.

[0156] In one embodiment, the AAV particle of the present invention may be produced in insect cells (e.g., Sf9 cells).

[0157] In one embodiment, the AAV particle of the present invention may be produced using triple transfection.

[0158] In one embodiment, the AAV particle of the present invention may be produced in mammalian cells.

[0159] In one embodiment, the AAV particle of the present invention may be produced by triple transfection in mammalian cells.

[0160] In one embodiment, the AAV particle of the present invention may be produced by triple transfection in HEK293 cells.

[0161] In some embodiments, the present invention provides a method for producing an AAV particle having enhanced (increased, improved) transduction efficiency comprising the steps of: 1) co-transfecting competent bacterial cells with a bacmid vector and either a viral construct vector and/or AAV payload construct vector, 2) isolating the resultant viral construct expression vector and AAV payload construct expression vector and separately transfecting viral replication cells, 3) isolating and purifying resultant payload and viral construct particles comprising viral construct expression vector or AAV payload construct expression vector, 4) co-infecting a viral replication cell with both the AAV payload and viral construct particles comprising viral construct expression vector or AAV payload construct expression vector, and 5) harvesting and purifying the AAV particle comprising a viral genome.

[0162] In some embodiments, the present invention provides a method for producing an AAV particle comprising the steps of 1) simultaneously co-transfecting mammalian cells, such as, but not limited to HEK293 cells, with a payload region, a construct expressing rep and cap genes and a helper construct, 2) harvesting and purifying the AAV particle comprising a viral genome.

### Cells

[0163] The present disclosure provides a cell comprising an AAV polynucleotide and/or AAV genome.

[0164] Viral production disclosed herein describes processes and methods for producing AAV particles that contact a target cell to deliver a payload construct, e.g. a recombinant viral construct, which comprises a nucleotide encoding a payload molecule.

[0165] In one embodiment, the AAV particles may be produced in a viral replication cell that comprises an insect cell.

[0166] Growing conditions for insect cells in culture, and production of heterologous products in insect cells in culture are well-known in the art, see U.S. Pat. No. 6,204,059, the contents of which are herein incorporated by reference in their entirety.

[0167] Any insect cell which allows for replication of parvovirus and which can be maintained in culture can be used in accordance with the present invention. Cell lines may be used from Spodoptera frugiperda, including, but not limited to the Sf9 or Sf21 cell lines, Drosophila cell lines, or mosquito cell lines, such as Aedes albopictus derived cell lines. Use of insect cells for expression of heterologous proteins is well documented, as are methods of introducing nucleic acids, such as vectors, e.g., insect-cell compatible vectors, into such cells and methods of maintaining such cells in culture. See, for example, Methods in Molecular Biology, ed. Richard, Humana Press, N J (1995); O'Reilly et al., Baculovirus Expression Vectors, A Laboratory Manual, Oxford Univ. Press (1994); Samulski et al., J. Vir. 63:3822-8 (1989); Kajigaya et al., Proc. Nat'l. Acad. Sci. USA 88: 4646-50 (1991); Ruffing et al., J. Vir. 66:6922-30 (1992); Kimbauer et al., Vir. 219:37-44 (1996); Zhao et al., Vir. 272:382-93 (2000); and Samulski et al., U.S. Pat. No. 6,204,059, the contents of each of which is herein incorporated by reference in their entirety.

[0168] The viral replication cell may be selected from any biological organism, including prokaryotic (e.g., bacterial) cells, and eukaryotic cells, including, insect cells, yeast cells and mammalian cells. Viral replication cells may comprise mammalian cells such as A549, WEH1, 3T3, 10T1/2, BHK, MDCK, COS 1, COS 7, BSC 1, BSC 40, BMT 10, VERO, W138, HeLa, 293, Saos, C2C12, L cells, HT1080, HepG2 and primary fibroblast, hepatocyte and myoblast cells derived from mammals. Viral replication cells comprise cells derived from mammalian species including, but not limited to, human, monkey, mouse, rat, rabbit, and hamster or cell type, including but not limited to fibroblast, hepatocyte, tumor cell, cell line transformed cell, etc.

### Small Scale Production of AAV Particles

[0169] Viral production disclosed herein describes processes and methods for producing AAV particles that contact a target cell to deliver a payload, e.g. a recombinant viral construct, which comprises a nucleotide encoding a payload.

[0170] In one embodiment, the AAV particles may be produced in a viral replication cell that comprises a mammalian cell.

[0171] Viral replication cells commonly used for production of recombinant AAV particles include, but are not limited to 293 cells, COS cells, HeLa cells, KB cells, and other mammalian cell lines as described in U.S. Pat. Nos. 6,156,303, 5,387,484, 5,741,683, 5,691,176, and 5,688,676; U.S. patent application 2002/0081721, and International Patent Applications WO 00/47757, WO 00/24916, and WO 96/17947, the contents of each of which are herein incorporated by reference in their entireties.

[0172] In one embodiment, AAV particles are produced in mammalian-cells wherein all three VP proteins are expressed at a stoichiometry approaching 1:1:10 (VP1:VP2:VP3). The regulatory mechanisms that allow this controlled level of expression include the production of two mRNAs, one for VP1, and the other for VP2 and VP3, produced by differential splicing.

[0173] In another embodiment, AAV particles are produced in mammalian cells using a triple transfection method wherein a payload construct, parvoviral Rep, and parvoviral Cap are comprised within three different constructs. The triple transfection method of the three components of AAV particle production may be utilized to produce small lots of virus for assays including transduction efficiency, target tissue (tropism) evaluation, and stability.

### Baculovirus

[0174] Particle production disclosed herein describes processes and methods for producing AAV particles that contact a target cell to deliver a payload construct which comprises a nucleotide encoding a payload.

[0175] Briefly, the viral construct vector and the AAV payload construct vector are each incorporated by a transposon donor/acceptor system into a bacmid, also known as a baculovirus plasmid, by standard molecular biology techniques known and performed by a person skilled in the art. Transfection of separate viral replication cell populations produces two baculoviruses, one that comprises the viral construct expression vector, and another that comprises the AAV payload construct expression vector. The two baculoviruses may be used to infect a single viral replication cell population for production of AAV particles.

[0176] Baculovirus expression vectors for producing viral particles in insect cells, including but not limited to Spodoptera frugiperda (Sf9) cells, provide high titers of viral particle product. Recombinant baculovirus encoding the viral construct expression vector and AAV payload construct expression vector initiates a productive infection of viral replicating cells. Infectious baculovirus particles released from the primary infection secondarily infect additional cells in the culture, exponentially infecting the entire cell culture population in a number of infection cycles that is a function of the initial multiplicity of infection, see Urabe, M. et al., J Virol. 2006 February; 80 (4): 1874-85, the contents of which are herein incorporated by reference in their entirety.

[0177] Production of AAV particles with baculovirus in an insect cell system may address known baculovirus genetic and physical instability. In one embodiment, the production system addresses baculovirus instability over multiple passages by utilizing a titerless infected-cells preservation and scale-up system. Small scale seed cultures of viral producing cells are transfected with viral expression constructs encoding the structural, non-structural, components of the viral particle. Baculovirus-infected viral producing cells are harvested into aliquots that may be cryopreserved in liquid nitrogen; the aliquots retain viability and infectivity for infection of large scale viral producing cell culture Wasilko D J et al., Protein Expr Purif. 2009 June; 65(2): 122-32, the contents of which are herein incorporated by reference in their entirety.

[0178] A genetically stable baculovirus may be used to produce source of the one or more of the components for producing AAV particles in invertebrate cells. In one embodiment, defective baculovirus expression vectors may be maintained episomally in insect cells. In such an embodiment the bacmid vector is engineered with replication control elements, including but not limited to promoters, enhancers, and/or cell-cycle regulated replication elements.

[0179] In one embodiment, baculoviruses may be engineered with a (non-) selectable marker for recombination into the chitinase/cathepsin locus. The chia/v-cath locus is non-essential for propagating baculovirus in tissue culture, and the V-cath (EC 3.4.22.50) is a cysteine endoprotease that is most active on Arg-Arg dipeptide containing substrates. The Arg-Arg dipeptide is present in densovirus and parvovirus capsid structural proteins but infrequently occurs in dependovirus VP1.

[0180] In one embodiment, stable viral replication cells permissive for baculovirus infection are engineered with at least one stable integrated copy of any of the elements necessary for AAV replication and viral particle production including, but not limited to, the entire AAV genome, Rep and Cap genes, Rep genes, Cap genes, each Rep protein as a separate transcription cassette, each VP protein as a separate transcription cassette, the AAP (assembly activation protein), or at least one of the baculovirus helper genes with native or non-native promoters.

### Large-Scale Production

[0181] In some embodiments, AAV particle production may be modified to increase the scale of production. Large scale viral production methods according to the present disclosure may include any of those taught in U.S. Pat. Nos. 5,756,283, 6,258,595, 6,261,551, 6,270,996, 6,281,010, 6,365,394, 6,475,769, 6,482,634, 6,485,966, 6,943,019, 6,953,690, 7,022,519, 7,238,526, 7,291,498 and 7,491,508 or International Publication Nos. WO1996039530, WO1998010088, WO1999014354, WO1999015685, WO1999047691, WO2000055342, WO2000075353 and WO2001023597, the contents of each of which are herein incorporated by reference in their entirety. Methods of increasing viral particle production scale typically comprise increasing the number of viral replication cells. In some embodiments, viral replication cells comprise adherent cells. To increase the scale of viral particle production by adherent viral replication cells, larger cell culture surfaces are required. In some cases, large-scale production methods comprise the use of roller bottles to increase cell culture surfaces. Other cell culture substrates with increased surface areas are known in the art. Examples of additional adherent cell culture products with increased surface areas include, but are not limited to CELLSTACK®, CELLCUBE® (Corning Corp., Corning, N.Y.) and NUNC™ CELL FACTORY™ (Thermo Scientific, Waltham, Mass.) In some cases, large-scale adherent cell surfaces may comprise from about 1,000 cm² to about 100,000 cm². In some cases, large-scale adherent cell cultures may comprise from about 10⁹ to about 10⁹ cells, from about 10⁸ to about 10¹⁰ cells, from about 10⁹ to about 10¹² cells or at least 10¹² cells. In some cases, large-scale adherent cultures may produce from about 10⁹ to about 10¹², from about 10¹⁰ to about 10¹³, from about 10¹¹ to about 10¹⁴, from about 10¹² to about 10¹⁵ or at least 10¹⁵ viral particles.

[0182] In some embodiments, large-scale viral production methods of the present disclosure may comprise the use of suspension cell cultures. Suspension cell culture allows for significantly increased numbers of cells. Typically, the number of adherent cells that can be grown on about 10-50 cm² of surface area can be grown in about 1 cm³ volume in suspension.

[0183] Transfection of replication cells in large-scale culture formats may be carried out according to any methods known in the art. For large-scale adherent cell cultures, transfection methods may include, but are not limited to the use of inorganic compounds (e.g. calcium phosphate), organic compounds (e.g. polyethylenimine (PEI)) or the use of non-chemical methods (e.g. electroporation.) With cells grown in suspension, transfection methods may include, but are not limited to the use of calcium phosphate and the use of PEI. In some cases, transfection of large scale suspension cultures may be carried out according to the section entitled “Transfection Procedure” described in Feng, L. et al., 2008. Biotechnol Appl. Biochem. 50:121-32, the contents of which are herein incorporated by reference in their entirety. According to such embodiments, PEI-DNA complexes may be formed for introduction of plasmids to be transfected. In some cases, cells being transfected with PEI-DNA complexes may be ‘shocked’ prior to transfection. This comprises lowering cell culture temperatures to 4° C. for a period of about 1 hour. In some cases, cell cultures may be shocked for a period of from about 10 minutes to about 5 hours. In some cases, cell cultures may be shocked at a temperature of from about 0° C. to about 20° C.

[0184] In some cases, transfections may include one or more vectors for expression of an RNA effector molecule to reduce expression of nucleic acids from one or more AAV payload construct. Such methods may enhance the production of viral particles by reducing cellular resources wasted on expressing payload constructs. In some cases, such methods may be carried according to those taught in US Publication No. US2014/0099666, the contents of which are herein incorporated by reference in their entirety.

### Bioreactors

[0185] In some embodiments, cell culture bioreactors may be used for large scale viral production. In some cases, bioreactors comprise stirred tank reactors. Such reactors generally comprise a vessel, typically cylindrical in shape, with a stirrer (e.g. impeller.) In some embodiments, such bioreactor vessels may be placed within a water jacket to control vessel temperature and/or to minimize effects from ambient temperature changes. Bioreactor vessel volume may range in size from about 500 ml to about 2 L, from about 1 L to about 5 L, from about 2.5 L to about 20 L, from about 10 L to about 50 L, from about 25 L to about 100 L, from about 75 L to about 500 L, from about 250 L to about 2,000 L, from about 1,000 L to about 10,000 L, from about 5,000 L to about 50,000 L or at least 50,000 L. Vessel bottoms may be rounded or flat. In some cases, animal cell cultures may be maintained in bioreactors with rounded vessel bottoms.

[0186] In some cases, bioreactor vessels may be warmed through the use of a thermocirculator. Thermocirculators pump heated water around water jackets. In some cases, heated water may be pumped through pipes (e.g. coiled pipes) that are present within bioreactor vessels. In some cases, warm air may be circulated around bioreactors, including, but not limited to air space directly above culture medium. Additionally, pH and C02 levels may be maintained to optimize cell viability.

[0187] In some cases, bioreactors may comprise hollow-fiber reactors. Hollow-fiber bioreactors may support the culture of both anchorage dependent and anchorage independent cells. Further bioreactors may include, but are not limited to packed-bed or fixed-bed bioreactors. Such bioreactors may comprise vessels with glass beads for adherent cell attachment. Further packed-bed reactors may comprise ceramic beads.

[0188] In some cases, viral particles are produced through the use of a disposable bioreactor. In some embodiments, such bioreactors may include WAVE™ disposable bioreactors.

[0189] In some embodiments, AAV particle production in animal cell bioreactor cultures may be carried out according to the methods taught in U.S. Pat. Nos. 5,064,764, 6,194,191, 6,566,118, 8,137,948 or US Patent Application No. US2011/0229971, the contents of each of which are herein incorporated by reference in their entirety.

### Cell Lysis

[0190] Cells of the invention, including, but not limited to viral production cells, may be subjected to cell lysis according to any methods known in the art. Cell lysis may be carried out to obtain one or more agents (e.g. viral particles) present within any cells of the invention. In some embodiments, cell lysis may be carried out according to any of the methods listed in U.S. Pat. Nos. 7,326,555, 7,579,181, 7,048,920, 6,410,300, 6,436,394, 7,732,129, 7,510,875, 7,445,930, 6,726,907, 6,194,191, 7,125,706, 6,995,006, 6,676,935, 7,968,333, 5,756,283, 6,258,595, 6,261,551, 6,270,996, 6,281,010, 6,365,394, 6,475,769, 6,482,634, 6,485,966, 6,943,019, 6,953,690, 7,022,519, 7,238,526, 7,291,498 and 7,491,508 or International Publication Nos. WO1996039530, WO1998010088, WO1999014354, WO1999015685, WO1999047691, WO2000055342, WO2000075353 and WO2001023597, the contents of each of which are herein incorporated by reference in their entirety. Cell lysis methods may be chemical or mechanical. Chemical cell lysis typically comprises contacting one or more cells with one or more lysis agent. Mechanical lysis typically comprises subjecting one or more cells to one or more lysis condition and/or one or more lysis force.

[0191] In some embodiments, chemical lysis may be used to lyse cells. As used herein, the term “lysis agent” refers to any agent that may aid in the disruption of a cell. In some cases, lysis agents are introduced in solutions, termed lysis solutions or lysis buffers. As used herein, the term “lysis solution” refers to a solution (typically aqueous) comprising one or more lysis agent. In addition to lysis agents, lysis solutions may include one or more buffering agents, solubilizing agents, surfactants, preservatives, cryoprotectants, enzymes, enzyme inhibitors and/or chelators. Lysis buffers are lysis solutions comprising one or more buffering agent. Additional components of lysis solutions may include one or more solubilizing agent. As used herein, the term “solubilizing agent” refers to a compound that enhances the solubility of one or more components of a solution and/or the solubility of one or more entities to which solutions are applied. In some cases, solubilizing agents enhance protein solubility. In some cases, solubilizing agents are selected based on their ability to enhance protein solubility while maintaining protein conformation and/or activity.

[0192] Exemplary lysis agents may include any of those described in U.S. Pat. Nos. 8,685,734, 7,901,921, 7,732,129, 7,223,585, 7,125,706, 8,236,495, 8,110,351, 7,419,956, 7,300,797, 6,699,706 and 6,143,567, the contents of each of which are herein incorporated by reference in their entirety. In some cases, lysis agents may be selected from lysis salts, amphoteric agents, cationic agents, ionic detergents and non-ionic detergents. Lysis salts may include, but are not limited to sodium chloride (NaCl) and potassium chloride (KCl) Further lysis salts may include any of those described in U.S. Pat. Nos. 8,614,101, 7,326,555, 7,579,181, 7,048,920, 6,410,300, 6,436,394, 7,732,129, 7,510,875, 7,445,930, 6,726,907, 6,194,191, 7,125,706, 6,995,006, 6,676,935 and 7,968,333, the contents of each of which are herein incorporated by reference in their entirety. Concentrations of salts may be increased or decreased to obtain an effective concentration for rupture of cell membranes. Amphoteric agents, as referred to herein, are compounds capable of reacting as an acid or a base. Amphoteric agents may include, but are not limited to lysophosphatidylcholine, 3-((3-Cholamidopropyl) dimethylammonium)-1-propanesulfonate (CHAPS), ZWITTERGENT® and the like. Cationic agents may include, but are not limited to cetyltrimethylammonium bromide (C (16) TAB) and Benzalkonium chloride. Lysis agents comprising detergents may include ionic detergents or non-ionic detergents. Detergents may function to break apart or dissolve cell structures including, but not limited to cell membranes, cell walls, lipids, carbohydrates, lipoproteins and glycoproteins. Exemplary ionic detergents include any of those taught in U.S. Pat. Nos. 7,625,570 and 6,593,123 or US Publication No. US2014/0087361, the contents of each of which are herein incorporated by reference in their entirety. Some ionic detergents may include, but are not limited to sodium dodecyl sulfate (SDS), cholate and deoxycholate. In some cases, ionic detergents may be included in lysis solutions as a solubilizing agent. Non-ionic detergents may include, but are not limited to octylglucoside, digitonin, lubrol, C12E8, TWEEN®-20, TWEEN®-80, Triton X-100 and Noniodet P-40. Non-ionic detergents are typically weaker lysis agents, but may be included as solubilizing agents for solubilizing cellular and/or viral proteins. Further lysis agents may include enzymes and urea. In some cases, one or more lysis agents may be combined in a lysis solution in order to enhance one or more of cell lysis and protein solubility. In some cases, enzyme inhibitors may be included in lysis solutions in order to prevent proteolysis that may be triggered by cell membrane disruption.

[0193] In some embodiments, mechanical cell lysis is carried out. Mechanical cell lysis methods may include the use of one or more lysis condition and/or one or more lysis force. As used herein, the term “lysis condition” refers to a state or circumstance that promotes cellular disruption. Lysis conditions may comprise certain temperatures, pressures, osmotic purity, salinity and the like. In some cases, lysis conditions comprise increased or decreased temperatures. According to some embodiments, lysis conditions comprise changes in temperature to promote cellular disruption. Cell lysis carried out according to such embodiments may include freeze-thaw lysis. As used herein, the term “freeze-thaw lysis” refers to cellular lysis in which a cell solution is subjected to one or more freeze-thaw cycle. According to freeze-thaw lysis methods, cells in solution are frozen to induce a mechanical disruption of cellular membranes caused by the formation and expansion of ice crystals. Cell solutions used according freeze-thaw lysis methods, may further comprise one or more lysis agents, solubilizing agents, buffering agents, cryoprotectants, surfactants, preservatives, enzymes, enzyme inhibitors and/or chelators. Once cell solutions subjected to freezing are thawed, such components may enhance the recovery of desired cellular products. In some cases, one or more cyroprotectants are included in cell solutions undergoing freeze-thaw lysis. As used herein, the term “cryoprotectant” refers to an agent used to protect one or more substance from damage due to freezing. Cryoprotectants may include any of those taught in US Publication No. US2013/0323302 or U.S. Pat. Nos. 6,503,888, 6,180,613, 7,888,096, 7,091,030, the contents of each of which are herein incorporated by reference in their entirety. In some cases, cryoprotectants may include, but are not limited to dimethyl sulfoxide, 1,2-propanediol, 2,3-butanediol, formamide, glycerol, ethylene glycol, 1,3-propanediol and n-dimethyl formamide, polyvinylpyrrolidone, hydroxyethyl starch, agarose, dextrans, inositol, glucose, hydroxyethylstarch, lactose, sorbitol, methyl glucose, sucrose and urea. In some embodiments, freeze-thaw lysis may be carried out according to any of the methods described in U.S. Pat. No. 7,704,721, the contents of which are herein incorporated by reference in their entirety.

[0194] As used herein, the term “lysis force” refers to a physical activity used to disrupt a cell. Lysis forces may include, but are not limited to mechanical forces, sonic forces, gravitational forces, optical forces, electrical forces and the like. Cell lysis carried out by mechanical force is referred to herein as “mechanical lysis.” Mechanical forces that may be used according to mechanical lysis may include high shear fluid forces. According to such methods of mechanical lysis, a microfluidizer may be used. Microfluidizers typically comprise an inlet reservoir where cell solutions may be applied. Cell solutions may then be pumped into an interaction chamber via a pump (e.g. high-pressure pump) at high speed and/or pressure to produce shear fluid forces. Resulting lysates may then be collected in one or more output reservoir. Pump speed and/or pressure may be adjusted to modulate cell lysis and enhance recovery of products (e.g. viral particles.) Other mechanical lysis methods may include physical disruption of cells by scraping.

[0195] Cell lysis methods may be selected based on the cell culture format of cells to be lysed. For example, with adherent cell cultures, some chemical and mechanical lysis methods may be used. Such mechanical lysis methods may include freeze-thaw lysis or scraping. In another example, chemical lysis of adherent cell cultures may be carried out through incubation with lysis solutions comprising surfactant, such as Triton-X-100. In some cases, cell lysates generated from adherent cell cultures may be treated with one more nuclease to lower the viscosity of the lysates caused by liberated DNA.

[0196] In one embodiment, a method for harvesting AAV particles without lysis may be used for efficient and scalable AAV particle production. In a non-limiting example, AAV particles may be produced by culturing an AAV particle lacking a heparin binding site, thereby allowing the AAV particle to pass into the supernatant, in a cell culture, collecting supernatant from the culture; and isolating the AAV particle from the supernatant, as described in US Patent Application 20090275107, the contents of which are incorporated herein by reference in their entirety.

### Clarification

[0197] Cell lysates comprising viral particles may be subjected to clarification. Clarification refers to initial steps taken in purification of viral particles from cell lysates. Clarification serves to prepare lysates for further purification by removing larger, insoluble debris. Clarification steps may include, but are not limited to centrifugation and filtration. During clarification, centrifugation may be carried out at low speeds to remove larger debris, only. Similarly, filtration may be carried out using filters with larger pore sizes so that only larger debris is removed. In some cases, tangential flow filtration may be used during clarification. Objectives of viral clarification include high throughput processing of cell lysates and to optimize ultimate viral recovery. Advantages of including a clarification step include scalability for processing of larger volumes of lysate. In some embodiments, clarification may be carried out according to any of the methods presented in U.S. Pat. Nos. 8,524,446, 5,756,283, 6,258,595, 6,261,551, 6,270,996, 6,281,010, 6,365,394, 6,475,769, 6,482,634, 6,485,966, 6,943,019, 6,953,690, 7,022,519, 7,238,526, 7,291,498, 7,491,508, US Publication Nos. US2013/0045186, US2011/0263027, US2011/0151434, US2003/0138772, and International Publication Nos. WO2002012455, WO1996039530, WO1998010088, WO1999014354, WO1999015685, WO1999047691, WO2000055342, WO2000075353 and WO2001023597, the contents of each of which are herein incorporated by reference in their entirety.

[0198] Methods of cell lysate clarification by filtration are well understood in the art and may be carried out according to a variety of available methods including, but not limited to passive filtration and flow filtration. Filters used may comprise a variety of materials and pore sizes. For example, cell lysate filters may comprise pore sizes of from about 1 μM to about 5 μM, from about 0.5 μM to about 2 μM, from about 0.1 μM to about 1 μM, from about 0.05 μM to about 0.05 μM and from about 0.001 μM to about 0.1 μM. Exemplary pore sizes for cell lysate filters may include, but are not limited to, 2.0, 1.9, 1.8, 1.7, 1.6, 1.5, 1.4, 1.3, 1.2, 1.1, 1, 0.9, 0.8, 0.7, 0.6, 0.5, 0.4, 0.3, 0.2, 0.1, 0.95, 0.9, 0.85, 0.8, 0.75, 0.7, 0.65, 0.6, 0.55, 0.5, 0.45, 0.4, 0.35, 0.3, 0.25, 0.2, 0.15, 0.1, 0.05, 0.22, 0.21, 0.20, 0.19, 0.18, 0.17, 0.16, 0.15, 0.14, 0.13, 0.12, 0.11, 0.1, 0.09, 0.08, 0.07, 0.06, 0.05, 0.04, 0.03, 0.02, 0.01, 0.02, 0.019, 0.018, 0.017, 0.016, 0.015, 0.014, 0.013, 0.012, 0.011, 0.01, 0.009, 0.008, 0.007, 0.006, 0.005, 0.004, 0.003, 0.002, 0.001 and 0.001 μM. In one embodiment, clarification may comprise filtration through a filter with 2.0 μM pore size to remove large debris, followed by passage through a filter with 0.45 μM pore size to remove intact cells.

[0199] Filter materials may be composed of a variety of materials. Such materials may include, but are not limited to polymeric materials and metal materials (e.g. sintered metal and pored aluminum.) Exemplary materials may include, but are not limited to nylon, cellulose materials (e.g. cellulose acetate), polyvinylidene fluoride (PVDF), polyethersulfone, polyamide, polysulfone, polypropylene, and polyethylene terephthalate. In some cases, filters useful for clarification of cell lysates may include, but are not limited to ULTIPLEAT PROFILE™ filters (Pall Corporation, Port Washington, N.Y.), SUPOR™ membrane filters (Pall Corporation, Port Washington, N.Y.).

[0200] In some cases, flow filtration may be carried out to increase filtration speed and/or effectiveness. In some cases, flow filtration may comprise vacuum filtration. According to such methods, a vacuum is created on the side of the filter opposite that of cell lysate to be filtered. In some cases, cell lysates may be passed through filters by centrifugal forces. In some cases, a pump is used to force cell lysate through clarification filters. Flow rate of cell lysate through one or more filters may be modulated by adjusting one of channel size and/or fluid pressure.

[0201] According to some embodiments, cell lysates may be clarified by centrifugation. Centrifugation may be used to pellet insoluble particles in the lysate. During clarification, centrifugation strength (expressed in terms of gravitational units (g), which represents multiples of standard gravitational force) may be lower than in subsequent purification steps. In some cases, centrifugation may be carried out on cell lysates at from about 200 g to about 800 g, from about 500 g to about 1500 g, from about 1000 g to about 5000 g, from about 1200 g to about 10000 g or from about 8000 g to about 15000 g. In some embodiments, cell lysate centrifugation is carried out at 8000 g for 15 minutes. In some cases, density gradient centrifugation may be carried out in order to partition particulates in the cell lysate by sedimentation rate. Gradients used according to methods of the present disclosure may include, but are not limited to cesium chloride gradients and iodixanol step gradients.

### Purification: Chromatography

[0202] In some cases, AAV particles may be purified from clarified cell lysates by one or more methods of chromatography. Chromatography refers to any number of methods known in the art for separating out one or more elements from a mixture. Such methods may include, but are not limited to ion exchange chromatography (e.g. cation exchange chromatography and anion exchange chromatography), immunoaffinity chromatography and size-exclusion chromatography. In some embodiments, methods of viral chromatography may include any of those taught in U.S. Pat. Nos. 5,756,283, 6,258,595, 6,261,551, 6,270,996, 6,281,010, 6,365,394, 6,475,769, 6,482,634, 6,485,966, 6,943,019, 6,953,690, 7,022,519, 7,238,526, 7,291,498 and 7,491,508 or International Publication Nos. WO1996039530, WO1998010088, WO1999014354, WO1999015685, WO1999047691, WO2000055342, WO2000075353 and WO2001023597, the contents of each of which are herein incorporated by reference in their entirety.

[0203] In some embodiments, ion exchange chromatography may be used to isolate viral particles. Ion exchange chromatography is used to bind viral particles based on charge-charge interactions between capsid proteins and charged sites present on a stationary phase, typically a column through which viral preparations (e.g. clarified lysates) are passed. After application of viral preparations, bound viral particles may then be eluted by applying an elution solution to disrupt the charge-charge interactions. Elution solutions may be optimized by adjusting salt concentration and/or pH to enhance recovery of bound viral particles. Depending on the charge of viral capsids being isolated, cation or anion exchange chromatography methods may be selected. Methods of ion exchange chromatography may include, but are not limited to any of those taught in U.S. Pat. Nos. 7,419,817, 6,143,548, 7,094,604, 6,593,123, 7,015,026 and 8,137,948, the contents of each of which are herein incorporated by reference in their entirety.

[0204] In some embodiments, immunoaffinity chromatography may be used. Immunoaffinity chromatography is a form of chromatography that utilizes one or more immune compounds (e.g. antibodies or antibody-related structures) to retain viral particles. Immune compounds may bind specifically to one or more structures on viral particle surfaces, including, but not limited to one or more viral coat protein. In some cases, immune compounds may be specific for a particular viral variant. In some cases, immune compounds may bind to multiple viral variants. In some embodiments, immune compounds may include recombinant single-chain antibodies. Such recombinant single chain antibodies may include those described in Smith, R. H. et al., 2009. Mol. Ther. 17(11):1888-96, the contents of which are herein incorporated by reference in their entirety. Such immune compounds are capable of binding to several AAV capsid variants, including, but not limited to AAV1, AAV2, AAV6 and AAV8.

[0205] In some embodiments, size-exclusion chromatography (SEC) may be used. SEC may comprise the use of a gel to separate particles according to size. In viral particle purification, SEC filtration is sometimes referred to as “polishing.” In some cases, SEC may be carried out to generate a final product that is near-homogenous. Such final products may in some cases be used in pre-clinical studies and/or clinical studies (Kotin, R. M. 2011. Human Molecular Genetics. 20(1):R2-R6, the contents of which are herein incorporated by reference in their entirety.) In some cases, SEC may be carried out according to any of the methods taught in U.S. Pat. Nos. 6,143,548, 7,015,026, 8,476,418, 6,410,300, 8,476,418, 7,419,817, 7,094,604, 6,593,123, and 8,137,948, the contents of each of which are herein incorporated by reference in their entirety.

[0206] In one embodiment, the compositions comprising at least one AAV particle may be isolated or purified using the methods described in U.S. Pat. No. 6,146,874, the contents of which are herein incorporated by reference in their entirety.

[0207] In one embodiment, the compositions comprising at least one AAV particle may be isolated or purified using the methods described in U.S. Pat. No. 6,660,514, the contents of which are herein incorporated by reference in their entirety.

[0208] In one embodiment, the compositions comprising at least one AAV particle may be isolated or purified using the methods described in U.S. Pat. No. 8,283,151, the contents of which are herein incorporated by reference in their entirety.

[0209] In one embodiment, the compositions comprising at least one AAV particle may be isolated or purified using the methods described in U.S. Pat. No. 8,524,446, the contents of which are herein incorporated by reference in their entirety.

### Methods of Use

### Gene Silencing: Knockdown Approach

[0210] When designed to inhibit or silence a gene, the AAV particles of the present disclosure may also comprise a viral genome that encodes a polynucleotide payload which may be processed to produce an siRNA, miRNA or other double stranded (ds) or single stranded (ss) gene modulatory motif.

[0211] Accordingly, the siRNA duplexes or dsRNA can be used to substantially inhibit gene expression in a cell, in particular cells of the CNS. In some aspects, the inhibition of gene expression refers to an inhibition by at least about 20%, preferably by at least about 30%, 40%, 50%, 60%, 70%, 80%, 85%, 90%, 95% and 100%. Accordingly, the protein product of the targeted gene may be inhibited by at least about 20%, preferably by at least about 30%, 40%, 50%, 60%, 70%, 80%, 85%, 90%, 95% and 100%. The gene can be either a wild type gene or a mutated gene with at least one mutation. Accordingly, the protein is either wild type protein or a mutated polypeptide with at least one mutation.

[0212] In some embodiments, the present disclosure provides methods for treating or ameliorating AADC Deficiency (AADCD) and related childhood monoamine neurotransmitter disorders in a subject in need of treatment, the method comprising administering to the subject an effective amount of at least one AAV particle comprising a viral genome encoding an siRNA duplex targeting the abnormal gene and/or protein, delivering duplex into targeted cells, inhibiting the gene expression and protein production, and ameliorating symptoms of the disease or condition in the subject.

### Treatment and Pharmaceutical Compositions

[0213] The present disclosure additionally provides a method for treating AADC Deficiency (AADCD) and related childhood monoamine neurotransmitter disorders in a mammalian subject, including a human subject, comprising administering to the subject any of the AAV polynucleotides or AAV genomes described herein (i.e., “viral genomes” or “VGs”) or administering to the subject a particle comprising said AAV polynucleotide or AAV genome, or administering to the subject any of the described compositions, including pharmaceutical compositions.

[0214] As used herein the term “composition” comprises an AAV polynucleotide or AAV genome or AAV particle and at least one excipient.

[0215] As used herein the term “pharmaceutical composition” comprises an AAV polynucleotide or AAV genome or AAV particle and one or more pharmaceutically acceptable excipients.

[0216] Although the descriptions of pharmaceutical compositions, e.g., those AAV particles or viral vectors comprising an AADC-encoding polynucleotide payload e.g., those (including the encoding plasmids or expression vectors, such as viruses, e.g., AAV) comprising a payload, e.g., AADC encoding sequences, to be delivered, provided herein are principally directed to pharmaceutical compositions which are suitable for administration to humans, it will be understood by the skilled artisan that such compositions are generally suitable for administration to any other animal, e.g., to non-human animals, e.g. non-human mammals. Modification of pharmaceutical compositions suitable for administration to humans in order to render the compositions suitable for administration to various animals is well understood, and the ordinarily skilled veterinary pharmacologist can design and/or perform such modification with merely ordinary, if any, experimentation. Subjects to which administration of the pharmaceutical compositions is contemplated include, but are not limited to, humans and/or other primates; mammals, including commercially relevant mammals such as cattle, pigs, horses, sheep, cats, dogs, mice, rats, birds, including commercially relevant birds such as poultry, chickens, ducks, geese, and/or turkeys.

[0217] In some embodiments, compositions are administered to humans, human patients or subjects. For the purposes of the present disclosure, the phrase “active ingredient” generally refers either to the AAV particle or viral vector carrying the payload or to the polynucleotide payload delivered by the AAV particle or viral vector as described herein.

[0218] In some embodiments, the compositions are administered to pediatric humans. In some embodiments the pediatric humans are between the ages of about 1 month and about 18 years. In some embodiments, the pediatric humans are between the ages of about 1 year and about 12 years. In some embodiments, the pediatric patients are between about 2 years and about 8 years. In some embodiments, the pediatric patients are between about 4 years and about 6 years.

[0219] In one embodiment, the compositions described herein are administered to a subject who has been diagnosed with AADC deficiency.

[0220] In one embodiment, the compositions described herein are used to decrease motor manifestations of AADC deficiency such as, but not limited to, hypotonia, marked motor delay, and/or involuntary movements such as dystonia and oculogyric crises. The decrease may be for a period of time (e.g., minutes, hours, days, weeks or years) or a reduction in the occurrence of the activity (e.g., a reduction by at least 1%, 5%, 10%, 15%, 20%, 30%, 40%, 50%, 60%, 70%, 80%, 90%, or more than 90%).

[0221] In one embodiment, the compositions described herein are used to decrease non-motor manifestations of AADC deficiency such as, but not limited to, autonomic disturbances, emotional liability, cognitive impairment and/or sleep disturbances. The decrease may be for a period of time (e.g., minutes, hours, days, weeks or years) or a reduction in the occurrence of the activity (e.g., a reduction by at least 1%, 5%, 10%, 15%, 20%, 30%, 40%, 50%, 60%, 70%, 80%, 90%, or more than 90%).

[0222] In one embodiment, the composition described herein is administered to a subject who has received dopaminergic therapy. As a non-limiting example, the subject may have a limited response to dopaminergic therapy.

[0223] In one embodiment, the composition of the present invention is used as described by Hwu and colleagues (Hwu, W. L., et al., 2012. Gene therapy for aromatic L-amino acid decarboxylase deficiency. Sci. Transl. Med. Vol. 4, 134ra61, the contents of which are herein incorporated by reference in their entirety), wherein four AADCD patients were treated with parenchymal delivery to the putamen of a recombinant AAV2 carrying human AADC. Components of the AAV2-hAADC vector included a cytomegalovirus immediate early gene promoter, the first intron of human growth factor, human AADC complementary DNA (cDNA), and a simian virus 40 polyadenylation signal. Each of the patients had mutations in the DDC gene (IVS6+4 A>T, or the less common c. 1927_1298insA), known to cause AADCD. Prior to treatment, patients were bed-ridden and displayed little to no spontaneous movement. After treatment, patients showed increased motor and cognitive performance as evaluated by the Alberta Infant Motor Scale (AIMS), Peabody Developmental Motor Scale (PDMS-II) and the Comprehensive Developmental Inventory for Infants and Toddlers (CDIIT). At 16 months subsequent to treatment, one patient was able to stand with assistance. Patients also showed improvement in non-motor symptoms, such as the occurrence of oculogyric crises, increased emotional stability and improvements in sweating and hypothermic conditions. Evaluations of neurotransmitters and their metabolites by PET and HPLC demonstrated increased dopamine, serotonin, homovanillic acid (HVA) and 5-hydroxyindoleactic acid (HIAA). Disadvantages to this approach included limited transduction of the vector to a small region of the putamen and increased anti-AAV2 neutralizing antibodies following treatment. In a non-limiting example, the viral particle of the present invention is an AAV2-CMV-hGH intron-hAADC-SV40 poly(A) vector. In a non-limiting example, use of the AAV particles of the present invention result in increased scores on the AIMS, PDMS-II and CDIIT evaluations. In another non-limiting example, administration of the AAV particles of the present invention results in improved motor and cognitive behavior in AADCD patients. In one embodiment, administration of the AAV particle of the present invention, leads to improved scores on AIMS, PDMS-II and/or CDIIT. In a non-limiting example the score increases 10 points. In another non-limiting example, the score increases 1 point. In another non-limiting example, the score increases 1, 2, 3, 4, 5, 6, 7, 8, 9, 10, 11, 12, 13, 14, 15, 16, 17, 18, 19, or 20 points. In another non-limiting example, use of the AAV particles of the present invention results in increased dopamine and serotonin levels.

[0224] In one embodiment, the AAV particle of the present invention may be or is as described in United States Publication No. US20120220648, the contents of which are herein incorporated by reference in their entirety. The AAV2-hAADC of SEQ ID NO: 1 of US20120220648 comprises a cytomegalovirus immediate early gene promoter, a P globin intron, a human AADC polynucleotide, and a simian virus 40 polyadenylation signal between two AAV2 ITRs with kanamycin resistance. As a non-limiting example, the AAV particle of the present invention may comprise any part of SEQ ID NO: 1 of US20120220648 or a variant thereof.

[0225] In one embodiment, the AAV particle of the present invention may be used in a compassionate treatment or clinical trial. As a non-limiting example of a compassionate treatment trial, Hwu and colleagues treated 8 patients with AADCD with AAV2-hAADC gene therapy. Treatment improved motor performance in all patients (4 able to stand with support, 3 able to sit with support), with the longest follow up exceeding four years following treatment. Further, no virus-associated toxicity has been identified. An ongoing Phase I/II clinical trial (NCT01395641, the contents of which are herein incorporated by reference in their entirety) by the same team is being used to assess the safety and efficacy of AAV2-hAADC treatment in patients with AADCD. Stereotactic surgery will be used to inject AAV2-hAADC bilaterally into the putamen (intracerebral infusion) of AADCD patients. Primary outcomes include increases in CSF levels of neurotransmitter metabolites HVA or HVIAA at a year post-treatment as well as an increase of 10 points or more on the PDMS-II. Secondary outcomes include safety measures of post-surgery intracerebral hemorrhage, post-surgery CSF leakage and severity of post-gene therapy dyskinesia and efficacy end points of body weight gain, increased signal in the putamen as measured by DOPA-PET (signal of de novo dopamine production), and increased score in other motor or developmental evaluations. The Clinical Trials registry indicates an estimated enrollment of 10 patients with a study completion date of September 2016.

[0226] In one embodiment, the AAV particle of the present invention is and is used to treat AADCD as described in Clinical Trial No. NCT01395641, the contents of which are herein incorporated by reference in their entirety.

[0227] In one embodiment, the AAV particle of the present invention is an AAV-hAADC, also known as AGIL-AADC, as described by Agilis Biotherapeutics.

[0228] In one embodiment, the AAV particle of the present invention is an AAV-hAADC, also known as AGIL-AADC, as described by Agilis Biotherapeutics and is the same as used in clinical trials by Hwu and colleagues, described herein.

[0229] The AAV particles of the present invention may be used or tested in any AADC animal model, including, but not limited to the Ddc^{KI} mouse as described in Lee, N.C., et al 2013 Regulation of the dopaminergic system in a murine model of aromatic L-amino acid decarboxylase deficiency. Neurobiol. Dis. 52:177-190; Lee, N.C., et al., 2015 Benefits of neuronal preferential systemic gene therapy for neurotransmitter deficiency. Mol. Ther. Vol. 23(10), 1572-1581; Lee, N.C., et al., 2013 Treatment of congenital neurotransmitter deficiencies by intracerebral ventricular injection of an adeno-associated virus serotype 9 vector. Hum. Gen. Ther. 25:189-198; and Hwu, W. L., et al., 2013 AADC deficiency: occurring in humans, modeled in rodents. Adv Pharmacol 68:273-284, the contents of each of which are herein incorporated by reference in their entirety. Non-limiting examples of animal models of AADC deficiency include mouse, non-human primate, rat, ferret, zebrafish, drosophila or c. elegans.

[0230] Based on the IVS6+4A>T mutation known to cause AADCD, a mouse model was created (Ddc^{KI} mice), in which a splicing mutation was knocked into the Ddc gene, along with a neomycin-resistance gene, to generate exon 6 skipping in the mRNA (Lee, N.C., et a 2013 Regulation of the dopaminergic system in a murine model of aromatic L-amino acid decarboxylase deficiency. Neurobiol. Dis. 52:177-190; Lee, N.C., et al., 2015 Benefits of neuronal preferential systemic gene therapy for neurotransmitter deficiency. Mol. Ther. Vol. 23(10), 1572-1581; Lee, N.C., et al., 2013 Treatment of congenital neurotransmitter deficiencies by intracerebral ventricular injection of an adeno-associated virus serotype 9 vector. Hum. Gen. Ther. 25:189-198; and Hwu, W. L., et al., 2013 AADC deficiency: occurring in humans, modeled in rodents. Adv Pharmacol 68:273-284, the contents of each of which are herein incorporated by reference in their entirety). Mouse Ddc knockout causes embryonic lethality, making this strategy not viable as an option for design of a mouse model. Meanwhile, the human IVS6+4A>T DDC gene mutation is known to interrupt the consensus sequence in intron 6, thereby causing inappropriate splicing. Homozygous knock-in mice survive into adulthood and are phenotypically similar to the clinical presentation of AADCD. Ddc^{KI} mice demonstrate disturbed weight gain, decreased survival and numerous behavioral, motor and autonomic dysfunctions. Interestingly, these mice show signs of spontaneous recovery with age, introducing a distinct caveat into this animal model.

[0231] Treatment of neonatal (P0) Ddc^{KI} mice by intracerebroventricular injection of AAV9-hAADC yielded improvements in weight gain, survival, dopamine and serotonin levels, cardiovascular function and motor behavior. The AAV9-AADC comprised a ubiquitous cytomegalovirus immediate early gene promoter, the first intron of human growth hormone, human AADC cDNA (NM_000790), a simian virus 40 polyadenylation signal, AAV2 ITRs and an AAV9 capsid. The AAV9-AADC vector was delivered by bilateral infusions of 2×10¹⁰ vg in 2 μL to the lateral ventricles using a Hamilton syringe. Despite some improvements in the Ddc^{KI} mice, delivery of the AAV9-AADC resulted in a hyperactivity, thereby negating some of the therapeutic benefit. (see Lee, N.C., et al., 2013 Treatment of congenital neurotransmitter deficiencies by intracerebral ventricular injection of an adeno-associated virus serotype 9 vector. Hum. Gen. Ther. 25:189-198, the contents of which are herein incorporated by reference in their entirety).

[0232] Translation of neonatal ICV injections to larger animals or human patients is challenging given the time frame of the development of the cranial bones and the blood brain barrier. In a follow-up study, treatment of young 7 day old Ddc^{M}K mice by intraperitoneal injection (systemic delivery) with AAV-AADC resulted in improvements in weight gain, survival, dopamine and serotonin levels, cardiovascular function, and motor and behavioral function. Two AAV-AADC vectors were tested, one that targeted neurons specifically and the other, previously described AAV9-AADC, which showed more ubiquitous targeting. Of the two vectors, the neuronal targeting vector showed superior efficacy in treating the Ddc^{KI} mice. The neuronal targeting AAV-AADC (AAVN-AADC) comprised a synapsin-I promoter for neuronal targeting, mouse AADC (NM_016672.4), a woodchuck hepatitis virus post-transcriptional regulatory element, AAV3 ITRs and an AAV9 capsid with a tyrosine to phenylalanine substitution at position 446 of the AAV9 capsid sequence.

[0233] In one embodiment, the AAV particle of the present invention is an AAVN-AADC, comprising a synapsin-I promoter, an AADC polynucleotide, a woodchuck hepatitis virus post-transcriptional regulatory element, AAV3 ITRs and an AAV9 capsid as described in Lee, N.C., et al., 2015 Benefits of neuronal preferential systemic gene therapy for neurotransmitter deficiency. Mol. Ther. Vol. 23(10), 1572-1581, the contents of which are herein incorporated by reference in their entirety. In one embodiment the AADC polynucleotide is a mouse AADC. In another embodiment the AADC polynucleotide is a human AADC.

[0234] In one embodiment, the AAV particle of the present invention is an AAV9-AADC, comprising a ubiquitous CMV promoter, the first intron of human growth hormone, an AADC polynucleotide, an SV40 poly(A), AAV2 ITRs and an AAV9 capsid, as described in Lee, N.C., et al., 2015 Benefits of neuronal preferential systemic gene therapy for neurotransmitter deficiency. Mol. Ther. Vol. 23(10), 1572-1581, the contents of which are herein incorporated by reference in their entirety. In one embodiment the AADC polynucleotide is a mouse AADC. In another embodiment the AADC polynucleotide is a human AADC.

[0235] The AAV particle of the present invention may be an AAV2-hAADC, AAVN-AADC, or AAV9-AADC as described in United States Publication No. US20120220648; Hwu, W. L., et al., 2012 Gene therapy for aromatic L-amino acid decarboxylase deficiency. Sci. Transl. Med. Vol. 4, 134ra61; Lee, N.C., et al., 2013 Treatment of congenital neurotransmitter deficiencies by intracerebral ventricular injection of an adeno-associated virus serotype 9 vector. Hum. Gen. Ther. 25:189-198; and Lee, N.C., et al., 2015 Benefits of neuronal preferential systemic gene therapy for neurotransmitter deficiency. Mol. Ther. Vol. 23(10), 1572-1581, the contents of each of which are herein incorporated by reference in their entirety.

### Circadian Rhythm and Sleep-Wake Cycles

[0236] Circadian rhythms are physical, mental and behavioral changes that tend to follow a 24 hour cycle. Circadian rhythms can influence sleep-wake cycles, hormone release, body temperature and other bodily functions. Changes in the circadian rhythm can cause conditions and/or disorder such as, but not limited to sleep disorders (e.g., insomnia), depression, bipolar disorder, seasonal affective disorder, obesity and diabetes.

[0237] In one embodiment, the AADC polynucleotides described herein may be used to treat insomnia.

[0238] The sleep-wake cycle comprises periods of sleep and periods of wake. Generally, in a 24 hours period the total hours of sleep are less than the total hours of wakefulness. As a non-limiting example, the sleep-wake cycle comprises 7-9 hours of sleep and 15-17 hours of wakefulness. As a non-limiting example, the sleep-wake cycle comprises 8 hours of sleep and 16 hours of wakefulness. As a non-limiting example, the sleep-wake cycle comprises 8-10 hours of sleep and 14-16 hours of wakefulness.

[0239] In one embodiment, the sleep-wake cycle of a subject is improved by administration to the subject of the AADC polynucleotides described herein.

[0240] In one embodiment, the sleep-wake cycle of a subject is regulated by administration to the subject of the AADC polynucleotides described herein. As a non-limiting example, the regulation may be the correction of more periods of sleep occurring at night and less periods of sleep occurring during the day.

[0241] In one embodiment, the sleep-wake cycle of a subject administered the AADC polynucleotides described herein improves as compared to the sleep-wake cycle of the subject prior to administration of the AADC polynucleotides. As a non-limiting example, the subject has an increased period of sleep and a decreased period of wakefulness. As another non-limiting example, the subject has a decreased period of sleep and an increased period of wakefulness.

[0242] In one embodiment, the sleep-wake cycle of a subject administered the AADC polynucleotides described herein is regulated as compared to the sleep-wake cycle of the subject prior to administration of the AADC polynucleotides. As a non-limiting example, the length of the periods of sleep and the periods of wakefulness may be about the same (e.g., +/−1 hour) for at least 2 days. As another non-limiting example, the length of the periods of sleep and the periods of wakefulness if a 24 hours period may be within 10 minutes, 15 minutes, 20 minutes, 25 minutes, 30 minutes, 35 minutes, 40 minutes, 45 minutes, 50 minutes, 55 minutes, 1 hour, 1.5 hours, or 2 hours of the previous 24 hour period.

[0243] In one embodiment, the amount of rapid eye movement (REM) sleep a subject experiences in a 24 hour period is altered after the subject is administered the AADC polynucleotides described herein. REM sleep is generally considered an active period of sleep marked by intense brain activity where brain waves are fast and desynchronized. An adult, on average, spends about 20-25% of their total daily sleep period in REM sleep. As a non-limiting example, the amount of REM sleep is decreased by 1%, 2%, 3%, 4%, 5%, 6%, 7%, 8%, 9%, 10%, 11%, 12%, 13%, 14%, 15%, 20%, 25%, 30%, 35%, 40%, 45%, 50%, 55%, 60%, 65% or more than 65%. As a non-limiting example, the amount of REM sleep is decreased by 1-1⁰%, 5-10%, 5-15%, 10-15%, 15-20%, 15-25%, 20-25%, 20-30%, 25-30%, 25-35%, 30-35%, 30-40%, 35-40%, 40-50% or 40-60%. As a non-limiting example, the amount of REM sleep is increased by 1%, 2%, 3%, 4%, 5%, 6%, 7%, 8%, 9%, 10%, 11%, 12%, 13%, 14%, 15%, 20%, 25%, 30%, 35%, 40%, 45%, 50%, 55%, 60%, 65% or more than 65%. As a non-limiting example, the amount of REM sleep is increased by 1-5%, 1-10%, 5-10%, 5-15%, 10-15%, 15-20%, 15-25%, 20-25%, 20-30%, 25-30%, 25-35%, 30-35%, 30-40%, 35-40%, 40-50% or 40-60%.

[0244] In one embodiment, the amount of non-REM (NREM) sleep a subject experiences in a 24 hour period is altered after the subject is administered the AADC polynucleotides described herein. NREM sleep is generally characterized by a reduction in physiological activity since the brain waves, as measured by EEG, get slower and have greater amplitude. NREM has four stages: Stage 1 is the time of drowsiness or transition from being awake to falling asleep where the brain waves and muscle activity begin to slow; Stage 2 is a period of light sleep during which eye movements stop and brain waves become slower with occasional bursts of rapid waves (sometimes called sleep spindles); Stage 3 and Stage 4 (collectively referred to as slow wave sleep) are characterized by the presence of slow brain waves (delta waves) interspersed with smaller faster waves where there are no eye movements. An adult, on average, spends about 75-80% of their total daily sleep period in NREM sleep with about half of their total daily sleep time in NREM stage 2 sleep.

[0245] In one embodiment, the amount of NREM sleep a subject experiences is altered after the subject is administered the AADC polynucleotides described herein. As a non-limiting example, the amount of NREM sleep is decreased by 1%, 2%, 3%, 4%, 5%, 6%, 7%, 8%, 9%, 10%, 11%, 12%, 13%, 14%, 15%, 20%, 25%, 30%, 35%, 40%, 45%, 50%, 55%, 60%, 65% or more than 65%. As a non-limiting example, the amount of NREM sleep is decreased by 1-10%, 5-10%, 5-15%, 10-15%, 15-20%, 15-25%, 20-25%, 20-30%, 25-30%, 25-35%, 30-35%, 30-40%, 35-40%, 40-50% or 40-60%. As a non-limiting example, the amount of NREM sleep is increased by 1%, 2%, 3%, 4%, 5%, 6%, 7%, 8%, 9%, 10%, 11%, 12%, 13%, 14%, 15%, 20%, 25%, 30%, 35%, 40%, 45%, 50%, 55%, 60%, 65% or more than 65%. As a non-limiting example, the amount of NREM sleep is increased by 1-5%, 1-10%, 5-10%, 5-15%, 10-15%, 15-20%, 15-25%, 20-25%, 20-30%, 25-30%, 25-35%, 30-35%, 30-40%, 35-40%, 40-50% or 40-60%.

[0246] In one embodiment, the amount of NREM Stage 1 sleep a subject experiences is altered after the subject is administered the AADC polynucleotides described herein. As a non-limiting example, the amount of NREM Stage 1 sleep is decreased by 1%, 2%, 3%, 4%, 5%, 6%, 7%, 8%, 9%, 10%, 11%, 12%, 13%, 14%, 15%, 20%, 25%, 30%, 35%, 40%, 45%, 50%, 55%, 60%, 65% or more than 65%. As a non-limiting example, the amount of NREM Stage 1 sleep is decreased by 1-10%, 5-10%, 5-15%, 10-15%, 15-20%, 15-25%, 20-25%, 20-30%, 25-30%, 25-35%, 30-35%, 30-40%, 35-40%, 40-50% or 40-60%. As a non-limiting example, the amount of NREM Stage 1 sleep is increased by 1%, 2%, 3%, 4%, 5%, 6%, 7%, 8%, 9%, 10%, 11%, 12%, 13%, 14%, 15%, 20%, 25%, 30%, 35%, 40%, 45%, 50%, 55%, 60%, 65% or more than 65%. As a non-limiting example, the amount of NREM Stage 1 sleep is increased by 1-5%, 1-10%, 5-10%, 5-15%, 10-15%, 15-20%, 15-25%, 20-25%, 20-30%, 25-30%, 25-35%, 30-35%, 30-40%, 35-40%, 40-50% or 40-60%.

[0247] In one embodiment, the amount of NREM Stage 2 sleep a subject experiences is altered after the subject is administered the AADC polynucleotides described herein. As a non-limiting example, the amount of NREM Stage 2 sleep is decreased by 1%, 2%, 3%, 4%, 5%, 6%, 7%, 8%, 9%, 10%, 11%, 12%, 13%, 14%, 15%, 20%, 25%, 30%, 35%, 40%, 45%, 50%, 55%, 60%, 65% or more than 65%. As a non-limiting example, the amount of NREM Stage 2 sleep is decreased by 1-10%, 5-10%, 5-15%, 10-15%, 15-20%, 15-25%, 20-25%, 20-30%, 25-30%, 25-35%, 30-35%, 30-40%, 35-40%, 40-50% or 40-60%. As a non-limiting example, the amount of NREM Stage 2 sleep is increased by 1%, 2%, 3%, 4%, 5%, 6%, 7%, 8%, 9%, 10%, 11%, 12%, 13%, 14%, 15%, 20%, 25%, 30%, 35%, 40%, 45%, 50%, 55%, 60%, 65% or more than 65%. As a non-limiting example, the amount of NREM Stage 2 sleep is increased by 1-5%, 1-10%, 5-10%, 5-15%, 10-15%, 15-20%, 15-25%, 20-25%, 20-30%, 25-30%, 25-35%, 30-35%, 30-40%, 35-40%, 40-50% or 40-60%.

[0248] In one embodiment, the amount of NREM Stage 3 and 4 sleep a subject experiences is altered after the subject is administered the AADC polynucleotides described herein. As a non-limiting example, the amount of NREM Stage 3 and 4 sleep is decreased by 1%, 2%, 3%, 4%, 5%, 6%, 7%, 8%, 9%, 10%, 11%, 12%, 13%, 14%, 15%, 20%, 25%, 30%, 35%, 40%, 45%, 50%, 55%, 60%, 65% or more than 65%. As a non-limiting example, the amount of NREM Stage 3 and 4 sleep is decreased by 1-10%, 5-10%, 5-15%, 10-15%, 15-20%, 15-25%, 20-25%, 20-30%, 25-30%, 25-35%, 30-35%, 30-40%, 35-40%, 40-50% or 40-60%. As a non-limiting example, the amount of NREM Stage 3 and 4 sleep is increased by 1%, 2%, 3%, 4%, 5%, 6%, 7%, 8%, 9%, 10%, 11%, 12%, 13%, 14%, 15%, 20%, 25%, 30%, 35%, 40%, 45%, 50%, 55%, 60%, 65% or more than 65%. As a non-limiting example, the amount of NREM Stage 3 and 4 sleep is increased by 1-5%, 1-10%, 5-10%, 5-15%, 10-15%, 15-20%, 15-25%, 20-25%, 20-30%, 25-30%, 25-35%, 30-35%, 30-40%, 35-40%, 40-50% or 40-60%.

[0249] In one embodiment, periods of NREM and REM cycles are more consistent in a subject after the subject is administered the AADC polynucleotides described herein. Generally NREM and REM cycles alternate every 90 to 110 minutes four to six times per night.

### Formulation and Delivery

### Formulation

[0250] The AAV particles or viral vectors can be formulated using one or more excipients to: (1) increase stability; (2) increase cell transfection or transduction; (3) permit the sustained or delayed release; (4) alter the biodistribution (e.g., target the viral particle to specific tissues or cell types); (5) increase the translation of encoded protein in vivo; (6) alter the release profile of encoded protein in vivo and/or (7) allow for regulatable expression of the payload.

[0251] Formulations of the present disclosure can include, without limitation, saline, lipidoids, liposomes, lipid nanoparticles, polymers, lipoplexes, core-shell nanoparticles, peptides, proteins, cells transfected with viral vectors (e.g., for transplantation into a subject), nanoparticle mimics and combinations thereof. Further, the viral vectors of the present disclosure may be formulated using self-assembled nucleic acid nanoparticles.

[0252] Formulations of the AAV pharmaceutical compositions described herein may be prepared by any method known or hereafter developed in the art of pharmacology. In general, such preparatory methods include the step of bringing the active ingredient into association with an excipient and/or one or more other accessory ingredients, and then, if necessary and/or desirable, dividing, shaping and/or packaging the product into a desired single- or multi-dose unit.

[0253] A pharmaceutical composition in accordance with the present disclosure may be prepared, packaged, and/or sold in bulk, as a single unit dose, and/or as a plurality of single unit doses. As used herein, a “unit dose” refers to a discrete amount of the pharmaceutical composition comprising a predetermined amount of the active ingredient. The amount of the active ingredient is generally equal to the dosage of the active ingredient which would be administered to a subject and/or a convenient fraction of such a dosage such as, for example, one-half or one-third of such a dosage.

[0254] Relative amounts of the active ingredient (e.g. AAV), the pharmaceutically acceptable excipient, and/or any additional ingredients in a pharmaceutical composition in accordance with the present disclosure may vary, depending upon the identity, size, and/or condition of the subject being treated and further depending upon the route by which the composition is to be administered. For example, the composition may comprise between 0.1% and 99% (w/w) of the active ingredient. By way of example, the composition may comprise between 0.1% and 100%, e.g., between 0.5 and 50%, between 1-30%, between 5-80%, at least 80% (w/w) active ingredient.

[0255] In one embodiment, the pharmaceutical composition comprises a recombinant adeno-associated virus (AAV) vector comprising an AAV capsid and an AAV vector genome. The AAV vector genome may comprise at least one AADC polynucleotide described herein, such as, but not limited to, SEQ ID NOs 6, 7, 8, 9, 17, 18, 19, 20, 21, 22, and 23 or variants having at least 95% identity thereto. The recombinant AAV vectors in the pharmaceutical composition may have at least 70% which contain an AAV vector genome.

[0256] In some embodiments, the AAV formulations described herein may contain at least one payload molecule, e.g., an AADC polynucleotide. As a non-limiting example, the formulations may contain 1, 2, 3, 4 or 5 AADC polynucleotide payload molecules. In one embodiment the formulation may contain a payload encoding proteins selected from categories such as, but not limited to, human proteins, veterinary proteins, bacterial proteins, biological proteins, antibodies, immunogenic proteins, therapeutic peptides and proteins, secreted proteins, plasma membrane proteins, cytoplasmic and cytoskeletal proteins, intracellular membrane bound proteins, nuclear proteins, proteins associated with human disease and/or proteins associated with non-human diseases. In one embodiment, the formulation contains at least three AAV payload encoding proteins.

[0257] The formulations can include one or more excipients, each in an amount that together increases the stability of the AAV particle, increases cell transfection or transduction by the viral particle, increases the expression of viral polynucleotide encoded protein, and/or alters the release profile of AAV polynucleotide encoded proteins. In some embodiments, a pharmaceutically acceptable excipient may be at least 95%, at least 96%, at least 97%, at least 98%, at least 99%, or 100% pure. In some embodiments, an excipient is approved for use for humans and for veterinary use. In some embodiments, an excipient may be approved by United States Food and Drug Administration. In some embodiments, an excipient may be of pharmaceutical grade. In some embodiments, an excipient may meet the standards of the United States Pharmacopoeia (USP), the European Pharmacopoeia (EP), the British Pharmacopoeia, and/or the International Pharmacopoeia.

[0258] Excipients, as used herein, include, but are not limited to, any and all solvents, dispersion media, diluents, or other liquid vehicles, dispersion or suspension aids, surface active agents, isotonic agents, thickening or emulsifying agents, preservatives, and the like, as suited to the particular dosage form desired. Various excipients for formulating pharmaceutical compositions and techniques for preparing the composition are known in the art (see Remington: The Science and Practice of Pharmacy, 21^{st} Edition, A. R. Gennaro, Lippincott, Williams & Wilkins, Baltimore, Md., 2006; incorporated herein by reference in its entirety). The use of a conventional excipient medium may be contemplated within the scope of the present disclosure, except insofar as any conventional excipient medium may be incompatible with a substance or its derivatives, such as by producing any undesirable biological effect or otherwise interacting in a deleterious manner with any other component(s) of the pharmaceutical composition. Exemplary diluents include, but are not limited to, calcium carbonate, sodium carbonate, calcium phosphate, dicalcium phosphate, calcium sulfate, calcium hydrogen phosphate, sodium phosphate lactose, sucrose, cellulose, microcrystalline cellulose, kaolin, mannitol, sorbitol, inositol, sodium chloride, dry starch, cornstarch, powdered sugar, etc., and/or combinations thereof.

[0259] In one embodiment, the AADC polynucleotides may be formulated in a hydrogel prior to administration. Hydrogels have a degree of flexibility which is similar to natural tissue as a result of their significant water content.

[0260] In another embodiment, a hydrogel may be administered to a subject prior to the administration of an AADC polynucleotide formulation. As a non-limiting example, the site of administration of the hydrogel may be within 3 inches (e.g., within 2.9, 2.8, 2.7, 2.6, 2.5, 2.4, 2.3, 2.2, 2.1, 2.0, 1.9, 1.8, 1.7, 1.6, 1.5, 1.4, 1.3, 1.2, 1.1, 1.0, 0.9, 0.8, 0.7, 0.6, 0.5, 0.4, 0.3, 0.2, 0.1 or less than 0.1 inches) of the site of administration of the AADC polynucleotide formulation.

[0261] In one embodiment, the AADC polynucleotides may be administered in saline. As a non-limiting example, the formulation may be phosphate buffered saline (PBS) with 0.001% Pluronic acid (F-68). Additionally the formulation may be sterilized.

### Inactive Ingredients

[0262] In some embodiments, AADC polynucleotide formulations may comprise at least one excipient which is an inactive ingredient. As used herein, the term “inactive ingredient” refers to one or more inactive agents included in formulations. In some embodiments, all, none or some of the inactive ingredients which may be used in the formulations of the present disclosure may be approved by the US Food and Drug Administration (FDA).

[0263] Formulations of AAV particles and viral vectors carrying AADC polynucleotides disclosed herein may include cations or anions. In one embodiment, the formulations include metal cations such as, but not limited to, Zn2+, Ca2+, Cu2+, Mg+ and combinations thereof. As a non-limiting example, formulations may include polymers and AADC polynucleotides complexed with a metal cation (See e.g., U.S. Pat. Nos. 6,265,389 and 6,555,525, each of which is herein incorporated by reference in its entirety).

### Administration

[0264] The AAV particles and viral vectors comprising AADC polynucleotides of the present disclosure may be administered by any route which results in a therapeutically effective outcome. These include, but are not limited to enteral (into the intestine), gastroenteral, epidural (into the dura matter), intracerebral (into the cerebrum), intracerebroventricular (into the cerebral ventricles, a.k.a. “intraventricular”), intradural (within or beneath the dura), intrastriatal (within the striatum, caudate nucleus and/or putamen), peridural, epicutaneous (application onto the skin), subcutaneous (under the skin), intradermal (into the skin itself), transdermal (diffusion through the intact skin for systemic distribution), transmucosal (diffusion through a mucous membrane), transvaginal, insufflation (snorting), sublingual, sublabial, enema, eye drops (onto the conjunctiva), in ear drops, auricular (in or by way of the ear), buccal (directed toward the cheek), conjunctival, cutaneous, dental (to a tooth or teeth), nasal administration (through the nose), intravenous (into a vein), intravenous bolus, intravenous drip, intraarterial (into an artery), intramuscular (into a muscle), intracardiac (into the heart), intraosseous infusion (into the bone marrow), intraperitoneal, (infusion or injection into the peritoneum), intravesical infusion, intravitreal, (through the eye), intracavernous injection (into a pathologic cavity) intracavitary (into the base of the penis), intravaginal administration, intrauterine, extra-amniotic administration, electro-osmosis, endocervical, endosinusial, endotracheal, extracorporeal, hemodialysis, infiltration, interstitial, intra-abdominal, intra-amniotic, intra-articular, intrabiliary, intrabronchial, intrabursal, intracartilaginous (within a cartilage), intracaudal (within the cauda equine), intracisternal (within the cisterna magna cerebellomedularis), intracorneal (within the cornea), dental intracornal, intracoronary (within the coronary arteries), intracorporus cavernosum (within the dilatable spaces of the corporus cavernosa of the penis), intradiscal (within a disc), intraductal (within a duct of a gland), intraduodenal (within the duodenum), intraepidermal (to the epidermis), intraesophageal (to the esophagus), intragastric (within the stomach), intragingival (within the gingivae), intraileal (within the distal portion of the small intestine), intralesional (within or introduced directly to a localized lesion), intraluminal (within a lumen of a tube), intralymphatic (within the lymph), intramedullary (within the marrow cavity of a bone), intrameningeal (within the meninges), intraocular (within the eye), intraovarian (within the ovary), intrapericardial (within the pericardium), intrapleural (within the pleura), intraprostatic (within the prostate gland), intrapulmonary (within the lungs or its bronchi), intrasinal (within the nasal or periorbital sinuses), intraspinal (within the vertebral column), intrasynovial (within the synovial cavity of a joint), intratendinous (within a tendon), intratesticular (within the testicle), intrathecal (within the cerebrospinal fluid at any level of the cerebrospinal axis), intrathoracic (within the thorax), intratubular (within the tubules of an organ), intratumor (within a tumor), intratympanic (within the aurus media), intravascular (within a vessel or vessels), intraventricular (within a ventricle), iontophoresis (by means of electric current where ions of soluble salts migrate into the tissues of the body), irrigation (to bathe or flush open wounds or body cavities), laryngeal (directly upon the larynx), nasogastric (through the nose and into the stomach), occlusive dressing technique (topical route administration which is then covered by a dressing which occludes the area), ophthalmic (to the external eye), oral (by way of the mouth), oropharyngeal (directly to the mouth and pharynx), parenteral, percutaneous, periarticular, perineural, periodontal, rectal, respiratory (within the respiratory tract by inhaling orally or nasally for local or systemic effect), retrobulbar (behind the pons or behind the eyeball), soft tissue, subarachnoid, subconjunctival, submucosal, topical, transplacental (through or across the placenta), transtracheal (through the wall of the trachea), transtympanic (across or through the tympanic cavity), ureteral (to the ureter), urethral (to the urethra), vaginal, caudal block, diagnostic, nerve block, biliary perfusion, cardiac perfusion, photopheresis or spinal. In specific embodiments, compositions may be administered in a way which allows them cross the blood-brain barrier (BBB), vascular barrier, or other epithelial barrier. In some embodiments, compositions may be administered to the substantia nigra, in particular, to the substantia nigra pars compacta (SNpc), and to the ventral tegmental area (VTA). In one embodiment, a formulation for a route of administration may include at least one inactive ingredient.

[0265] In one embodiment, the viral vectors comprising AADC polynucleotides of the present invention may be administered to the ventricles.

[0266] In one embodiment, the viral vectors comprising AADC polynucleotides of the present invention may be administered to the ventricles by intracerebroventricular delivery.

[0267] In one embodiment, the viral vectors comprising AADC polynucleotides of the present invention may be administered systemically.

[0268] In one embodiment, the viral vectors comprising AADC polynucleotides of the present invention may be administered systemically by intraperitoneal injection.

[0269] In one embodiment, the viral vectors comprising AADC polynucleotides of the present invention may be administered systemically by intravascular injection.

[0270] In one embodiment, the viral vectors comprising AADC polynucleotides of the present invention may be administered to the putamen.

[0271] In one embodiment, the viral vectors comprising AADC polynucleotides of the present invention may be administered to the right putamen and/or the left putamen. The administration may be at one or more sites in the putamen such as, but not limited to, 2 sites, 3 sites, 4 sites or more than 4 sites. As a non-limiting example, the viral vectors comprising AADC polynucleotides of the present invention are delivered to 2 sites in the left putamen and 2 sites in the right putamen.

[0272] In one embodiment, the administration of the formulation of the viral vectors comprising the AADC polynucleotides of the present invention to a subject provides coverage of the putamen of a subject (e.g., the left and/or right putamen). In one aspect, the administration of the viral vectors comprising the AADC polynucleotides may provide at least 8%, 9%, 10%, 13%, 14%15%, 19%, 20%, 21%, 22%, 23%, 24%, 25%, 26%, 27%, 28%, 29%, 30%, 31%, 32%, 33%, 34%, 35%, 36%, 37%, 38%, 39%, 40%, 41%, 42%, 43%, 44%, 45%, 46%, 47%, 48%, 49%, 50%, 51%, 52%, 53%, 54%, 55%, 60%, 65%, 70%, 75%, 80%, 85%, 90%, 95% or more than 95% to the left and/or right putamen of a subject. As a non-limiting example, the coverage is at least 20%. As a non-limiting example, the coverage is at least 40%. In another aspect, the administration of the viral vectors comprising the AADC polynucleotides may provide at least 8%, 9%, 10%, 13%, 14%, 15%, 19%, 20%, 21%, 22%, 23%, 24%, 25%, 26%, 27%, 28%, 29%, 30%, 31%, 32%, 33%, 34%, 35%, 36%, 37%, 38%, 39%, 40%, 41%, 42%, 43%, 44%, 45%, 46%, 47%, 48%, 49%, 50%, 51%, 52%, 53%, 54%, 55%, 60%, 65%, 70%, 75%, 80%, 85%, 90%, 95% or more than 95% coverage of the surface area of the left and/or right putamen of a subject. As a non-limiting example, the total coverage is at least 20%. As a non-limiting example, the total coverage is at least 40%. In yet another aspect, the administration of the viral vectors comprising the AADC polynucleotides may provide 10-40%, 20-40%, 20-30%, 20-35%, 20-50%, 30-40%, 35-40%, 30-60%, 40-70%, 50-80% or 60-90% coverage to the left and/or right putamen of a subject or to the total surface area of the left and/or right putamen of a subject.

[0273] In one embodiment, the administration of the formulation of the viral vectors comprising the AADC polynucleotides of the present invention to a subject provides coverage of the posterior putamen of a subject (e.g., the left and/or right posterior putamen). In one aspect, the administration of the viral vectors comprising the AADC polynucleotides may provide at least 10%, 15%, 20%, 21%, 22%, 23%, 24%, 25%, 26%, 27%, 28%, 29%, 30%, 31%, 32%, 33%, 34%, 35%, 36%, 37%, 38%, 39%, 40%, 41%, 42%, 43%, 44%, 45%, 46%, 47%, 48%, 49%, 50%, 51%, 52%, 53%, 54%, 55%, 60%, 65%, 70%, 75%, 80%, 85%, 90%, 95% or more than 95% to the left and/or right posterior putamen of a subject. As a non-limiting example, the coverage is at least 20%. As a non-limiting example, the coverage is at least 40%. In another aspect, the administration of the viral vectors comprising the AADC polynucleotides may provide at least 10%, 15%, 20%, 21%, 22%, 23%, 24%, 25%, 26%, 27%, 28%, 29%, 30%, 31%, 32%, 33%, 34%, 35%, 36%, 37%, 38%, 39%, 40%, 41%, 42%, 43%, 44%, 45%, 46%, 47%, 48%, 49%, 50%, 51%, 52%, 53%, 54%, 55%, 60%, 65%, 70%, 75%, 80%, 85%, 90%, 95% or more than 95% coverage of the surface area of the left and/or right posterior putamen of a subject. As a non-limiting example, the total coverage is at least 20%. As a non-limiting example, the total coverage is at least 40%. In yet another aspect, the administration of the viral vectors comprising the AADC polynucleotides may provide 10-40%, 20-50%, 30-60%, 40-70%, 50-80% or 60-90% coverage to the left and/or right posterior putamen of a subject or to the total surface area of the left and/or right putamen of a subject.

[0274] In one embodiment, a subject may be administered the viral-vectors comprising AADC polynucleotides of the present invention safely delivered to substantia nigra pars compacta (SNpc) and ventral tegmental area (VTA) via bilateral infusions, or alternatively, intrastriatally (into the caudate nucleus and putamen), or into the subthalamic nucleus (STN).

[0275] In one embodiment, the AADC polynucleotides described herein may be administered bilaterally to the putamen.

[0276] In one embodiment, the AADC polynucleotides described herein may be administered bilaterally to the putamen by parenchymal delivery.

[0277] In one embodiment, the AADC polynucleotides described herein may be administered using acute bilateral placement of catheters into each putamen. The placement may use magnetic resonance image (MRI)-guided stereotactic neurosurgical techniques known in the art or described herein. Additionally, a contrast agent such as, but not limited to a gadolinium based contrast agent (e.g., PROHANCE®) may be used in the formulation to monitor and confirm the distribution of the formulation.

[0278] In one embodiment, a subject may be administered the viral vectors comprising AADC polynucleotides of the present invention in a bilateral stereotactic CED-assisted step infusion into the putamen (e.g., the post commissural putamen).

[0279] The AAV particle of the present invention may be administered or delivered to a subject suffering from AADC deficiency by any of the methods described in United States Publication No. US20120220648; Clinical Trial NCT01395641; Hwu, W. L., et al., 2012 Gene therapy for aromatic L-amino acid decarboxylase deficiency. Sci. Transl. Med. Vol. 4, 134ra61; Lee, N.C., et al., 2013 Treatment of congenital neurotransmitter deficiencies by intracerebral ventricular injection of an adeno-associated virus serotype 9 vector. Hum. Gen. Ther. 25:189-198; and Lee, N.C., et al., 2015 Benefits of neuronal preferential systemic gene therapy for neurotransmitter deficiency. Mol. Ther. Vol. 23(10), 1572-1581, the contents of each of which are herein incorporated by reference in their entirety.

[0280] In one embodiment, the AAV particle of the present invention is delivered by intraperitoneal injection (systemic delivery) as described in Lee, N.C., et al., 2015 Benefits of neuronal preferential systemic gene therapy for neurotransmitter deficiency. Mol. Ther. Vol. 23(10), 1572-1581, the contents of which are herein incorporated by reference in their entirety.

[0281] In one embodiment, delivery of viral vector pharmaceutical compositions in accordance with the present invention to cells of the central nervous system (e.g., parenchyma) comprises a rate of delivery defined by VG/hour=mL/hour*VG/mL, wherein VG is viral genomes, VG/mL is composition concentration, and mL/hour is rate of prolonged infusion.

[0282] In one embodiment, delivery of viral vector pharmaceutical compositions in accordance with the present invention to cells of the central nervous system (e.g., parenchyma) comprises infusion of up to 1 mL. In one embodiment, delivery of viral vector pharmaceutical compositions in accordance with the present invention to cells of the central nervous system (e.g., parenchyma) may comprise infusion of 0.0001, 0.0002, 0.001, 0.002, 0.003, 0.004, 0.005, 0.008, 0.010, 0.015, 0.020, 0.025, 0.030, 0.040, 0.050, 0.060, 0.070, 0.080, 0.090, 0.1, 0.2, 0.3, 0.4, 0.5, 0.6, 0.7, 0.8, or 0.9 mL. In a non-limiting example the AAV particles of the present invention are infused in a volume of 80 L. In another non-limiting example the AAV particles of the present invention are infused in a volume of 20 μL. In a non-limiting example, the AAV particles of the present invention are infused in a volume of 2 μL.

[0283] In one embodiment, delivery of viral vector pharmaceutical compositions in accordance with the present invention to cells of the central nervous system (e.g., parenchyma) comprises infusion of between about 1 mL to about 120 mL. In one embodiment, delivery of viral vector pharmaceutical compositions in accordance with the present invention to cells of the central nervous system (e.g., parenchyma) may comprise an infusion of 0.1, 1, 1.1, 1.2, 1.3, 1.4, 1.5, 1.6, 1.7, 1.8, 1.9, 2, 3, 4, 5, 6, 7, 8, 9, 10, 11, 12, 13, 14, 15, 16, 17, 18, 19, 20, 21, 22, 23, 24, 25, 26, 27, 28, 29, 30, 31, 32, 33, 34, 35, 36, 37, 38, 39, 40, 41, 42, 43, 44, 45, 46, 47, 48, 49, 50, 51, 52, 53, 54, 55, 56, 57, 58, 59, 60, 61, 62, 63, 64, 65, 66, 67, 68, 69, 70, 71, 72, 73, 74, 75, 76, 77, 78, 79, 80, 81, 82, 83, 84, 85, 86, 87, 88, 89, 90, 91, 92, 93, 94, 95, 96, 97, 98, 99, 100, 101, 102, 103, 104, 105, 106, 107, 108, 109, 110, 111, 112, 113, 114, 115, 116, 117, 118, 119, or 120 mL. In one embodiment, delivery of AAV particles to cells of the central nervous system (e.g., parenchyma) comprises infusion of at least 3 mL. In one embodiment, delivery of AAV particles to cells of the central nervous system (e.g., parenchyma) consists of infusion of 3 mL. In one embodiment, delivery of AAV particles to cells of the central nervous system (e.g., parenchyma) comprises infusion of at least 10 mL. In one embodiment, delivery of AAV particles to cells of the central nervous system (e.g., parenchyma) consists of infusion of 10 mL.

[0284] In one embodiment, the volume of the viral vector pharmaceutical composition delivered to the cells of the central nervous system (e.g., parenchyma) of a subject is 2 ul, 20 ul, 50 ul, 80 ul, 100 ul, 200 ul, 300 ul, 400 ul, 500 ul, 600 ul, 700 ul, 800 ul, 900 ul, 1000 ul, 1100 ul, 1200 ul, 1300 ul, 1400 ul, 1500 ul, 1600 ul, 1700 ul, 1800 ul, 1900 ul, 2000 ul or more than 2000 ul. In a non-limiting example the AAV particles of the present invention are infused in a volume of 80 ul. In another non-limiting example the AAV particles of the present invention are infused in a volume of 20 ul. In a non-limiting example, the AAV particles of the present invention are infused in a volume of 2 ul.

[0285] In one embodiment, the volume of the viral vector pharmaceutical composition delivered to a region in both hemispheres of a subject brain is 2 ul, 20 ul, 50 ul, 80 ul, 100 ul, 200 ul, 300 ul, 400 ul, 500 ul, 600 ul, 700 ul, 800 ul, 900 ul, 1000 ul, 1100 ul, 1200 ul, 1300 ul, 1400 ul, 1500 ul, 1600 ul, 1700 ul, 1800 ul, 1900 ul, 2000 ul or more than 2000 ul. As a non-limiting example, the volume delivered to a region in both hemispheres is 200 ul. As another non-limiting example, the volume delivered to a region in both hemispheres is 900 ul. As yet another non-limiting example, the volume delivered to a region in both hemispheres is 1800 ul.

[0286] In one embodiment, the volume of the viral vector pharmaceutical composition delivered to the putamen in both hemispheres of a subject brain is 2 ul, 20 ul, 50 ul, 80 ul, 100 ul, 200 ul, 300 ul, 400 ul, 450 ul, 500 ul, 600 ul, 700 ul, 800 ul, 900 ul, 1000 ul, 1100 ul, 1200 ul, 1300 ul, 1400 ul, 1500 ul, 1600 ul, 1700 ul, 1800 ul, 1900 ul, 2000 ul or more than 2000 ul. As a non-limiting example, the volume delivered to the putamen in both hemispheres is 100 ul. As another non-limiting example, the volume delivered to the putamen in both hemispheres is 200 ul. As a non-limiting example, the volume delivered to the putamen in both hemispheres is 300 ul. As another non-limiting example, the volume delivered to the putamen in both hemispheres is 450 ul. As another non-limiting example, the volume delivered to the putamen in both hemispheres is 900 ul. As yet another non-limiting example, the volume delivered to the putamen in both hemispheres is 1800 ul.

[0287] In one embodiment, the total volume delivered to a subject may be split between one or more administration sites e.g., 1, 2, 3, 4, 5 or more than 5 sites. As a non-limiting example, the total volume is split between administration to the left and right putamen. As another non-limiting example, the total volume is split between two sites of administration to each of the left and right putamen.

[0288] In one embodiment, the viral vector pharmaceutical composition is administered using a fenestrated needle. Non-limiting examples of fenestrated needles are described in U.S. Pat. Nos. 8,333,734, 7,135,010, 7,575,572, 7,699,852, 4,411,657, 6,890,319, 6,613,026, 6,726,659, 6,565,572, 6,520,949, 6,382,212, 5,848,996, 5,759,179, 5,674,267, 5,588,960, 5,484,401, 5,199,441, 5,012,818, 4,474,569, 3,766,907, 3,552,394, the contents of each of which are herein incorporated by reference in their entirety.

[0289] In one embodiment, a composition comprises AADC polynucleotides described herein and the AADC polynucleotides are components of an AAV viral genome packaged in an AAV viral particle. The percent (%) ratio of AAV viral particles comprising the AADC polynucleotide (also referred to herein and AADC particles) to the AAV viral particles without the AADC polynucleotide (also referred to herein as empty capsids) in the composition may be 0:100, 1:99, 0:90, 15:85, 25:75, 30:70, 50:50, 70:30, 85:15, 90:10, 99:1 or 100:0. As a non-limiting example, the percent ratio of AADC particles to empty capsids is 50:50. As another non-limiting example, the percent ratio of AADC particles to empty capsids is 70:30. As another non-limiting example, the percent ratio of AADC particles to empty capsids is 85:15. As another non-limiting example, the percent ratio of AADC particles to empty capsids is 100:0.

[0290] In one embodiment, the composition described herein comprises at least 1, 5, 10, 15, 20, 25, 30, 35, 40, 45, 50, 51, 52, 53, 54, 55, 60, 65, 70, 75, 80, 81, 82, 83, 84, 85, 86, 87, 88, 89, 90, 91, 92, 93, 94, 95, 96, 97, 98, 99 or greater than 99% AADC particles. As a non-limiting example, the composition comprises at least 50% AADC particles. As another non-limiting example, the composition comprises at least 52% AADC particles. As another non-limiting example, the composition comprises at least 58% AADC particles. As another non-limiting example, the composition comprises at least 70% AADC particles. As another non-limiting example, the composition comprises at least 83% AADC particles. As another non-limiting example, the composition comprises at least 85% AADC particles. As another non-limiting example, the composition comprises at least 99% AADC particles. As another non-limiting example, the composition comprises 100% AADC particles.

[0291] In one embodiment, the composition described herein comprises 1-10%, 10-20%, 30-40%, 50-60%, 50-70%, 50-80%, 50-90%, 50-99%, 50-100%, 60-70%, 60-80%, 60-90%, 60-99%, 60-100%, 70-80%, 70-90%, 70-99%, 70-100%, 80-85%, 80-90%, 80-95%, 80-99%, 80-100%, 90-95%, 90-99%, or 90-100% AADC particles. As a non-limiting example, the composition described herein comprises 50-100% AADC particles. As another non-limiting example, the composition described herein comprises 50-60% AADC particles. As another non-limiting example, the composition described herein comprises 80-99% AADC particles. As another non-limiting example, the composition described herein comprises 80-90% AADC particles. As a non-limiting example, the composition described herein comprises 80-95% AADC particles. As a non-limiting example, the composition described herein comprises 80-85% AADC particles.

[0292] In one embodiment, the composition described herein comprises less than 1, 5, 10, 15, 20, 25, 30, 35, 40, 45, 50, 51, 52, 53, 54, 55, 60, 65, 70, 75, 80, 81, 82, 83, 84, 85, 86, 87, 88, 89, 90, 91, 92, 93, 94, 95, 96, 97, 98, 99 or 100% empty particles. As a non-limiting example, the composition comprises less than 50% empty particles. As a non-limiting example, the composition comprises less than 45% empty particles. As a non-limiting example, the composition comprises less than 40% empty particles. As a non-limiting example, the composition comprises less than 35% empty particles. As a non-limiting example, the composition comprises less than 30% empty particles. As a non-limiting example, the composition comprises less than 25% empty particles. As a non-limiting example, the composition comprises less than 20% empty particles. As a non-limiting example, the composition comprises less than 15% empty particles. As a non-limiting example, the composition comprises less than 10% empty particles. As a non-limiting example, the composition comprises less than 5% empty particles. As a non-limiting example, the composition comprises less than 1% empty particles.

[0293] In one embodiment, the composition described herein comprises 1-10%, 10-20%, 30-40%, 50-60%, 50-70%, 50-80%, 50-90%, 50-99%, 50-100%, 60-70%, 60-80%, 60-90%, 60-99%, 60-100%, 70-80%, 70-90%, 70-99%, 70-100%, 80-85%, 80-90%, 80-95%, 80-99%, 80-100%, 90-95%, 90-99%, or 90-100% empty particles. As a non-limiting example, the composition described herein comprises 30-40% empty particles. As another non-limiting example, the composition described herein comprises 30-50% AADC particles. As another non-limiting example, the composition described herein comprises 30-60% empty particles. As another non-limiting example, the composition described herein comprises 30-70% empty particles. As a non-limiting example, the composition described herein comprises 30-80% empty particles. As a non-limiting example, the composition described herein comprises 30-90% empty particles.

### Dosing

[0294] The present disclosure provides methods comprising administering AAV particles or viral vectors and their payload or complexes in accordance with the disclosure to a subject in need thereof. AAV particle or viral vector pharmaceutical, imaging, diagnostic, or prophylactic compositions may be administered to a subject using any amount and any route of administration effective for preventing, treating, diagnosing, or imaging a disease, disorder, and/or condition (e.g., a disease, disorder, and/or condition relating to working memory deficits). The exact amount required will vary from subject to subject, depending on the species, age, and general condition of the subject, the severity of the disease, the particular composition, its mode of administration, its mode of activity, and the like. Compositions in accordance with the disclosure are typically formulated in unit dosage form for ease of administration and uniformity of dosage. It will be understood, however, that the total daily usage of the compositions of the present disclosure may be decided by the attending physician within the scope of sound medical judgment. The specific therapeutically effective, prophylactically effective, or appropriate imaging dose level for any particular patient will depend upon a variety of factors including the disorder being treated and the severity of the disorder; the activity of the specific payload employed; the specific composition employed; the age, body weight, general health, sex and diet of the patient; the time of administration, route of administration, and rate of excretion of the specific payload employed; the duration of the treatment; drugs used in combination or coincidental with the specific payload employed; and like factors well known in the medical arts.

[0295] In certain embodiments, AAV particle or viral vector pharmaceutical compositions in accordance with the present disclosure may be administered at dosage levels sufficient to deliver from about 0.0001 mg/kg to about 100 mg/kg, from about 0.001 mg/kg to about 0.05 mg/kg, from about 0.005 mg/kg to about 0.05 mg/kg, from about 0.001 mg/kg to about 0.005 mg/kg, from about 0.05 mg/kg to about 0.5 mg/kg, from about 0.01 mg/kg to about 50 mg/kg, from about 0.1 mg/kg to about 40 mg/kg, from about 0.5 mg/kg to about 30 mg/kg, from about 0.01 mg/kg to about 10 mg/kg, from about 0.1 mg/kg to about 10 mg/kg, or from about 1 mg/kg to about 25 mg/kg, of subject body weight per day, one or more times a day, to obtain the desired therapeutic, diagnostic, prophylactic, or imaging effect. It will be understood that the above dosing concentrations may be converted to vg or viral genomes per kg or into total viral genomes administered by one of skill in the art.

[0296] In certain embodiments, AAV particle or viral vector pharmaceutical compositions in accordance with the present disclosure may be administered at about 10 to about 600 μl/site, 50 to about 500 μl/site, 100 to about 400 μl/site, 120 to about 300 μl/site, 140 to about 200 μl/site, about 160 μl/site.

[0297] The desired dosage may be delivered three times in a single day, two times in a single day, once in a since day or in a period of 24 hours the dosage may be delivered once, twice, three times or more than three times. In certain embodiments, the desired dosage may be delivered using multiple administrations (e.g., two, three, four, five, six, seven, eight, nine, ten, eleven, twelve, thirteen, fourteen, or more administrations). When multiple administrations are employed, split dosing regimens such as those described herein may be used. As used herein, a “split dose” is the division of single unit dose or total daily dose into two or more doses, e.g., two or more administrations of the single unit dose. As used herein, a “single unit dose” is a dose of any therapeutic administered in one dose/at one time/single route/single point of contact, i.e., single administration event. As used herein, a “total daily dose” is an amount given or prescribed in 24 hr period. It may be administered as a single unit dose. In one embodiment, the AAV particles or viral vectors of the present disclosure are administered to a subject in split doses, and may be formulated in buffer only or in a formulation described herein.

[0298] A pharmaceutical composition described herein can be formulated into a dosage form described herein, such as a topical, intranasal, pulmonary, intratracheal, or injectable (e.g., intravenous, intraocular, intravitreal, intramuscular, intracardiac, intraperitoneal, and/or subcutaneous).

[0299] In one embodiment, delivery of viral vector pharmaceutical compositions in accordance with the present invention to cells of the central nervous system (e.g., parenchyma) may comprise a total concentration between about 1×10⁶ VG/mL and about 1×10¹⁶ VG/mL. In some embodiments, delivery may comprise a composition concentration of about 1×10⁶, 2×10⁶, 3×10⁶, 4×10⁶, 5×10⁶, 6×10⁶, 7×10⁶, 8×10⁶, 9×10⁶, 1×10⁷, 2×10⁷, 3×10⁷, 4×10⁷, 5×10⁷, 6×10⁷, 7×10⁷, 8×10⁷, 9×10⁷, 1×10⁸, 2×10, 3×10⁸, 4×10⁸, 5×10, 6×10, 7×10, 8×10, 9×10⁸, 1×10⁹, 2×10⁹, 3×10⁹, 4×10⁹, 5×10⁹, 6×10⁹, 7×10⁹, 8×10⁹, 9×10⁹, 1×10¹⁰, 2×10¹⁰, 3×10¹⁰, 4×10¹⁰, 5×10¹⁰, 6×10¹⁰, 7×10¹⁰, 8×10¹⁰, 9×10¹⁰, 1×10¹¹, 1.6×10¹¹, 1.8×10¹¹, 2×10¹¹, 3×10¹¹, 4×10¹¹, 5×10¹¹, 5.5×10¹¹, 6×10¹¹, 7×10¹¹, 8×10¹¹, 9×10¹¹, 0.8×10¹², 0.83×10¹², 1×10¹², 1.1×10¹², 1.2×10¹², 1.3×10¹², 1.4×10¹², 1.5×10¹², 1.6×10¹², 1.7×10¹², 1.8×10¹², 1.9×10¹², 2×10¹², 2.1×10¹², 2.2×10¹², 2.3×10¹², 2.4×10¹², 2.5×10¹², 2.6×10¹², 2.7×10¹², 2.8×10¹², 2.9×10¹², 3×10¹², 3.1×10¹², 3.2×10¹², 3.3×10¹², 3.4×10¹², 3.5×10¹², 3.6×10¹², 3.7×10¹², 3.8×10¹², 3.9×10¹², 4×10¹², 4.1×10¹², 4.2×10¹², 4.3×10¹², 4.4×10¹², 4.5×10¹², 4.6×10¹², 4.7×10¹², 4.8×10¹², 4.9×10¹², 5×10¹², 6×10¹², 7×10¹², 8×10¹², 9×10¹², 1×10¹³, 2×10¹³, 2.3×10¹³, 3×10¹³, 4×10¹³, 5×10¹³, 6×10¹³, 7×10¹³, 8×10¹³, 9×10¹³, 1×10¹⁴, 1.9×10¹⁴, 2×10¹⁴, 3×10¹⁴, 4×10¹⁴, 5×10¹⁴, 6×10¹⁴, 7×10¹⁴, 8×10¹⁴, 9×10¹⁴, 1×10¹⁵, 2×10¹⁵, 3×10¹⁵, 4×10¹⁵, 5×10¹⁵, 6×10¹⁵, 7×10¹⁵, 8×10¹⁵, 9×10¹⁵, or 1×10¹⁶ VG/mL. In one embodiment, the concentration of the viral vector in the composition is 1×10¹³ VG/mL. In one embodiment, the concentration of the viral vector in the composition is 1.1×10¹² VG/mL. In one embodiment, the concentration of the viral vector in the composition is 3.7×10¹² VG/mL. In one embodiment, the concentration of the viral vector in the composition is 8×10¹¹ VG/mL. In one embodiment, the concentration of the viral vector in the composition is 2.6×10¹² VG/mL. In one embodiment, the concentration of the viral vector in the composition is 4.9×10¹² VG/mL. In one embodiment, the concentration of the viral vector in the composition is 0.8×10¹² VG/mL. In one embodiment, the concentration of the viral vector in the composition is 0.83×10¹² VG/mL. In one embodiment, the concentration of the viral vector in the composition is the maximum final dose which can be contained in a vial. In one embodiment, the concentration of the viral vector in the composition is 1.6×10¹¹ VG/mL. In one embodiment, the concentration of the viral vector in the composition is 5×10¹¹ VG/mL. In one embodiment, the concentration of the viral vector in the composition is 2.3×10¹³ VG/mL. In one embodiment, the concentration of the viral vector in the composition is 1.9×10¹⁴ VG/mL.

[0300] In one embodiment, delivery of viral vector pharmaceutical compositions in accordance with the present invention to cells of the central nervous system (e.g., parenchyma) may comprise a total concentration per subject between about 1×10⁶ VG and about 1×10¹⁶ VG. In some embodiments, delivery may comprise a composition concentration of about 1×10⁶, 2×10⁶, 3×10⁶, 4×10⁶, 5×10⁶, 6×10⁶, 7×10⁶, 8×10⁶, 9×10⁶, 1×10⁷, 2×10⁷, 3×10⁷, 4×10⁷, 5×10⁷, 6×10⁷, 7×10⁷, 8×10⁷, 9×10⁷, 1×10⁸, 2×10⁸, 3×10⁸, 4×10⁸, 5×10⁸, 6×10⁸, 7×10⁸, 8×10⁸, 9×10⁸, 1×10⁹, 2×10⁹, 3×10⁹, 4×10⁹, 5×10⁹, 6×10⁹, 7×10⁹, 8×10⁹, 9×10⁹, 1×10¹⁰, 2×10¹⁰, 3×10¹⁰, 4×10¹⁰, 5×10¹⁰, 6×10¹⁰, 7×10¹⁰, 8×10¹⁰, 9×10¹⁰, 1×10¹¹, 1.6×10¹¹, 2×10¹¹, 2.1×10¹¹, 2.2×10¹¹, 2.3×10¹¹, 2.4×10¹¹, 2.5×10¹¹, 2.6×10¹¹, 2.7×10¹¹, 2.8×10¹¹, 2.9×10¹¹, 3×10¹¹, 4×10¹¹, 4.6×10¹¹, 5×10¹¹, 6×10¹¹, 7×10¹¹, 7.1×10¹¹, 7.2×10¹¹, 7.3×10¹¹, 7.4×10¹¹, 7.5×10¹¹, 7.6×10¹¹, 7.7×10¹¹, 7.8×10¹¹, 7.9×10¹¹, 8×10¹¹, 9×10¹¹, 1×10¹², 1.1×10¹², 1.2×10¹², 1.3×10¹², 1.4×10¹², 1.5×10¹², 1.6×10¹², 1.7×10¹², 1.8×10¹², 1.9×10¹², 2×10¹², 2.3×10¹², 3×10¹², 4×10¹², 4.1×10¹², 4.2×10¹², 4.3×10¹², 4.4×10¹², 4.5×10¹², 4.6×10¹², 4.7×10¹², 4.8×10¹², 4.9×10¹², 5×10¹², 6×10¹², 7×10¹², 8×10¹², 8.1×10¹², 8.2×10¹², 8.3×10¹², 8.4×10¹², 8.5×10¹², 8.6×10¹², 8.7×10¹², 8.8×10¹², 8.9×10¹², 9×10¹², 1×10¹³, 2×10¹³, 3×10¹³, 4×10¹³, 5×10¹³, 6×10¹³, 7×10¹³, 8×10¹³, 9×10¹³, 1×10¹⁴, 2×10¹⁴, 3×10¹⁴, 4×10¹⁴, 5×10¹⁴, 6×10¹⁴, 7×10¹⁴, 8×10¹⁴, 9×10¹⁴, 1×10¹⁵, 2×10¹⁵, 3×10¹⁵, 4×10¹⁵, 5×10¹⁵, 6×10¹⁵, 7×10¹⁵, 8×10¹⁵, 9×10¹⁵, or 1×10¹⁶ VG/subject. In one embodiment, the concentration of the viral vector in the composition is 2.3×10¹¹ VG/subject. In one embodiment, the concentration of the viral vector in the composition is 7.2×10¹¹ VG/subject. In one embodiment, the concentration of the viral vector in the composition is 7.5×10¹¹ VG/subject. In one embodiment, the concentration of the viral vector in the composition is 1.4×10¹² VG/subject. In one embodiment, the concentration of the viral vector in the composition is 4.8×10¹² VG/subject. In one embodiment, the concentration of the viral vector in the composition is 8.8×10¹² VG/subject. In one embodiment, the concentration of the viral vector in the composition is 2.3×10¹² VG/subject. In one embodiment, the concentration of the viral vector in the composition is 2×10¹⁰ VG/subject. In one embodiment, the concentration of the viral vector in the composition is 1.6×10¹¹ VG/subject. In one embodiment, the concentration of the viral vector in the composition is 4.6×10¹¹ VG/subject.

[0301] In one embodiment, AAV particles of the present invention may be delivered as an 80 L infusion of a composition with the concentration of 5×10¹¹ vg/ml, yielding a total of 1.6×10¹¹ VG delivered to each patient.

[0302] In one embodiment, AAV particles of the present invention may be delivered as an 80 μL infusion of a composition with the concentration of 5×10¹¹ vg/ml, yielding a total of 1.6×10¹¹ VG delivered to each patient.

[0303] In one embodiment, AAV particles of the present invention may be delivered as an 80 μL infusion of a composition with the concentration of 5×10¹¹ vg/ml at a rate of 3 ul per min, yielding a total of 1.6×10¹¹ VG delivered to each patient.

[0304] In one embodiment, AAV particles of the present invention may be delivered as an 80 μL infusion of a composition with the concentration of 5×10¹¹ vg/ml at a rate of 3 ul per min, yielding a total of 1.6×10¹¹ VG delivered to each patient.

[0305] In one embodiment, the effectiveness of the dose, route of administration and/or volume of administration may be evaluated using various methods described herein such as, but not limited to, PET imaging, L-DOPA challenge test, UPDRS scores and patient diaries. As a non-limiting example, a subject may have decreased dyskinesia or periods of dyskinesia after administration of the AADC polynucleotide composition. As another non-limiting example, a subject may have a decrease in AADC Deficiency related symptoms including limited mobility and dyskinesia.

[0306] In one embodiment, a subject who may be administered a dose of the AADC polynucleotides described herein may have been previously treated with the same or similar therapeutic. In another embodiment, a subject may have been treated with a therapeutic which has been shown to reduce the symptoms of AADC Deficiency.

[0307] In one embodiment, a subject who may be administered a dose of the AADC polynucleotides described herein may have failed to derive adequate benefit from standard medical therapy. As a non-limiting example, the subject may not have responded to treatment. As another non-limiting example, a subject may have residual disability despite treatment.

[0308] In one embodiment, a subject who may be administered a dose of the AADC polynucleotides described herein may undergo testing to evaluate the levels of neurotransmitter analytes to determine the effectiveness of the dose. As a non-limiting example, CSF neurotransmitters, plasma AADC activity and/or urine VLA may be analyzed.

[0309] In one embodiment, a subject who may be administered a dose of the AADC polynucleotide described herein may be videotaped or recorded in order to monitor the progress of the subject during the course of treatment.

### Combinations

[0310] The AAV particles or viral vectors comprising the AADC polynucleotide may be used in combination with one or more other therapeutic, prophylactic, diagnostic, or imaging agents. By “in combination with,” it is not intended to imply that the agents must be administered at the same time and/or formulated for delivery together, although these methods of delivery are within the scope of the present disclosure. Compositions can be administered concurrently with, prior to, or subsequent to, one or more other desired therapeutics or medical procedures. In general, each agent will be administered at a dose and/or on a time schedule determined for that agent. In some embodiments, the present disclosure encompasses delivery of pharmaceutical, prophylactic, diagnostic, or imaging compositions in combination with agents that may improve their bioavailability, reduce and/or modify their metabolism, inhibit their excretion, and/or modify their distribution within the body.

### Delivery

[0311] In one embodiment, the viral vector comprising an AADC polynucleotide may be administered or delivered using the methods for the delivery of AAV virions described in European Patent Application No. EP1857552, the contents of which are herein incorporated by reference in their entirety.

[0312] In one embodiment, the viral vector comprising an AADC polynucleotide may be administered or delivered using the methods for delivering proteins using AAV vectors described in European Patent Application No. EP2678433, the contents of which are herein incorporated by reference in their entirety.

[0313] In one embodiment, the viral vector comprising an AADC polynucleotide may be administered or delivered using the methods for delivering DNA molecules using AAV vectors described in U.S. Pat. No. 5,858,351, the contents of which are herein incorporated by reference in their entirety.

[0314] In one embodiment, the viral vector comprising an AADC polynucleotide may be administered or delivered using the methods for delivering DNA to the bloodstream described in U.S. Pat. No. 6,211,163, the contents of which are herein incorporated by reference in their entirety.

[0315] In one embodiment, the viral vector comprising an AADC polynucleotide may be administered or delivered using the methods for delivering AAV virions described in U.S. Pat. No. 6,325,998, the contents of which are herein incorporated by reference in their entirety.

[0316] In one embodiment, the viral vector comprising an AADC polynucleotide may be administered or delivered using the methods for delivering a payload to the central nervous system described in U.S. Pat. No. 7,588,757, the contents of which are herein incorporated by reference in their entirety.

[0317] In one embodiment, the viral vector comprising an AADC polynucleotide may be administered or delivered using the methods for delivering a payload described in U.S. Pat. No. 8,283,151, the contents of which are herein incorporated by reference in their entirety.

[0318] In one embodiment, the viral vector comprising an AADC polynucleotide may be administered or delivered using the methods for delivering a payload using a glutamic acid decarboxylase (GAD) delivery vector described in International Patent Publication No. WO2001089583, the contents of which are herein incorporated by reference in their entirety.

[0319] In one embodiment, the viral vector comprising an AADC polynucleotide may be administered or delivered using the methods for delivering a payload to neural cells described in International Patent Publication No. WO2012057363, the contents of which are herein incorporated by reference in their entirety.

[0320] The AAV particle of the present invention may be administered or delivered by any of the methods described in United States Publication No. US20120220648; Clinical trial NCT01395641; Hwu, W. L., et al., 2012 Gene therapy for aromatic L-amino acid decarboxylase deficiency. Sci. Transl. Med. Vol. 4, 134ra61; Lee, N.C., et al., 2013 Treatment of congenital neurotransmitter deficiencies by intracerebral ventricular injection of an adeno-associated virus serotype 9 vector. Hum. Gen. Ther. 25:189-198; and Lee, N.C., et al., 2015 Benefits of neuronal preferential systemic gene therapy for neurotransmitter deficiency. Mol. Ther. Vol. 23(10), 1572-1581, the contents of each of which are herein incorporated by reference in their entirety.

[0321] In one embodiment, the AADC polynucleotides of the present invention may be delivered in the same manner as described in Hwu, W. L., et al., 2012 Gene therapy for aromatic L-amino acid decarboxylase deficiency. Sci. Transl. Med. Vol. 4, 134ra61, the contents of which are herein incorporated by reference in their entirety, wherein two burr holes were created on either side of midline of the skull to target the putamen in each hemisphere, ensuring the burr holes are sufficiently distant from one another in the dorsolateral direction. A guide tube was first inserted, the stylet removed and a long needle stereotactically inserted for the infusion. During the infusion the needle was slowly withdrawn so as to allow vector distribution along the length of the needle tract (6-8 mm).

### Delivery to Cells

[0322] The present disclosure provides a method of delivering to a cell or tissue any of the above-described AAV polynucleotides or AAV genomes, comprising contacting the cell or tissue with said AAV polynucleotide or AAV genomes or contacting the cell or tissue with a particle comprising said AAV polynucleotide or AAV genome, or contacting the cell or tissue with any of the described compositions, including pharmaceutical compositions. The method of delivering the AAV polynucleotide or AAV genome to a cell or tissue can be accomplished in vitro, ex vivo, or in vivo.

### Delivery to Subjects

[0323] The present disclosure additionally provides a method of delivering to a subject, including a mammalian subject, any of the above-described AAV polynucleotides or AAV genomes comprising administering to the subject said AAV polynucleotide or AAV genome, or administering to the subject a particle comprising said AAV polynucleotide or AAV genome, or administering to the subject any of the described compositions, including pharmaceutical compositions.

[0324] The pharmaceutical compositions of viral vectors described herein may be characterized by one or more of bioavailability, therapeutic window and/or volume of distribution.

### Bioavailability

[0325] Viral vectors comprising an AADC polynucleotide of the present invention, when formulated into compositions with delivery/formulation agents or vehicles as described herein, may exhibit increased bioavailability as compared to compositions lacking delivery agents as described herein. As used herein, the term “bioavailability” refers to the systemic availability of a given amount of a particular agent administered to a subject. Bioavailability may be assessed by measuring the area under the curve (AUC) or the maximum serum or plasma concentration (Cₘₐₓ) of the unchanged form of a compound following administration of the compound to a mammal. AUC is a determination of the area under the curve plotting the serum or plasma concentration of a compound along the ordinate (Y-axis) against time along the abscissa (X-axis). Generally, the AUC for a particular compound may be calculated using methods known to those of ordinary skill in the art and as described in G. S. Banker, Modern Pharmaceutics, Drugs and the Pharmaceutical Sciences, v. 72, Marcel Dekker, New York, Inc., 1996, the contents of which are herein incorporated by reference in their entirety.

[0326] Cₘₐₓ values are maximum concentrations of compounds achieved in serum or plasma of a subject following administration of compounds to the subject. Cₘₐₓ values of particular compounds may be measured using methods known to those of ordinary skill in the art. As used herein, the phrases “increasing bioavailability” or “improving the pharmacokinetics,” refer to actions that may increase the systemic availability of a viral vector of the present disclosure (as measured by AUC, Cₘₐₓ, or Cₘᵢₙ) in a subject. In some embodiments, such actions may comprise co-administration with one or more delivery agents as described herein. In some embodiments, the bioavailability of viral vectors may increase by at least about 2%, at least about 5%, at least about 10%, at least about 15%, at least about 20%, at least about 25%, at least about 30%, at least about 35%, at least about 40%, at least about 45%, at least about 50%, at least about 55%, at least about 60%, at least about 65%, at least about 70%, at least about 75%, at least about 80%, at least about 85%, at least about 90%, at least about 95% or about 100%.

### Therapeutic Window

[0327] Viral vectors comprising an AADC polynucleotide of the present invention, when formulated with one or more delivery agents as described herein, may exhibit increases in the therapeutic window of compound and/or composition administration as compared to the therapeutic window of viral vectors administered without one or more delivery agents as described herein. As used herein, the term “therapeutic window” refers to the range of plasma concentrations, or the range of levels of therapeutically active substance at the site of action, with a high probability of eliciting a therapeutic effect. In some embodiments, therapeutic windows of viral vectors when administered in a formulation may increase by at least about 2%, at least about 5%, at least about 10%, at least about 15%, at least about 20%, at least about 25%, at least about 30%, at least about 35%, at least about 40%, at least about 45%, at least about 50%, at least about 55%, at least about 60%, at least about 65%, at least about 70%, at least about 75%, at least about 80%, at least about 85%, at least about 90%, at least about 95% or about 100%.

### Volume of Distribution

[0328] Viral vectors comprising an AADC polynucleotide of the present invention, when formulated with one or more delivery agents as described herein, may exhibit an improved volume of distribution (Vdist), e.g., reduced or targeted, relative to formulations lacking one or more delivery agents as described herein. Vdist relates the amount of an agent in the body to the concentration of the same agent in the blood or plasma. As used herein, the term “volume of distribution” refers to the fluid volume that would be required to contain the total amount of an agent in the body at the same concentration as in the blood or plasma: Vdist equals the amount of an agent in the body/concentration of the agent in blood or plasma. For example, for a 10 mg dose of a given agent and a plasma concentration of 10 mg/L, the volume of distribution would be 1 liter. The volume of distribution reflects the extent to which an agent is present in the extravascular tissue. Large volumes of distribution reflect the tendency of agents to bind to the tissue components as compared with plasma proteins. In clinical settings, Vdist may be used to determine loading doses to achieve steady state concentrations. In some embodiments, volumes of distribution of viral vector compositions of the present disclosure when co-administered with one or more delivery agents as described herein may decrease at least about 2%, at least about 5%, at least about 10%, at least about 15%, at least about 20%, at least about 25%, at least about 30%, at least about 35%, at least about 40%, at least about 45%, at least about 50%, at least about 55%, at least about 60%, at least about 65%, at least about 70%.

### Kits and Devices

### Kits

[0329] The present disclosure provides a variety of kits for conveniently and/or effectively carrying out methods of the present invention. Typically kits will comprise sufficient amounts and/or numbers of components to allow a user to perform multiple treatments of a subject(s) and/or to perform multiple experiments.

[0330] Any of the AADC vectors, AADC constructs, AADC polynucleotides, or AADC polypeptides of the present disclosure may be comprised in a kit. In some embodiments, kits may further include reagents and/or instructions for creating and/or synthesizing compounds and/or compositions of the present invention. In some embodiments, kits may also include one or more buffers. In some embodiments, kits may include components for making protein or nucleic acid arrays or libraries and thus, may include, for example, solid supports.

[0331] In some embodiments, kit components may be packaged either in aqueous media or in lyophilized form. The container means of the kits will generally include at least one vial, test tube, flask, bottle, syringe or other container means, into which a component may be placed, and preferably, suitably aliquoted. Where there are more than one kit component, (labeling reagent and label may be packaged together), kits may also generally contain second, third or other additional containers into which additional components may be separately placed. In some embodiments, kits may also comprise second container means for containing sterile, pharmaceutically acceptable buffers and/or other diluents. In some embodiments, various combinations of components may be comprised in one or more vial. Kits of the present disclosure may also typically include means for containing compounds and/or compositions of the present invention, e.g., proteins, nucleic acids, and any other reagent containers in close confinement for commercial sale. Such containers may include injection or blow-molded plastic containers into which desired vials are retained.

[0332] In some embodiments, kit components are provided in one and/or more liquid solutions. In some embodiments, liquid solutions are aqueous solutions, with sterile aqueous solutions being particularly preferred. In some embodiments, kit components may be provided as dried powder(s). When reagents and/or components are provided as dry powders, such powders may be reconstituted by the addition of suitable volumes of solvent. In some embodiments, it is envisioned that solvents may also be provided in another container means. In some embodiments, labeling dyes are provided as dried powders. In some embodiments, it is contemplated that 10, 20, 30, 40, 50, 60, 70, 80, 90, 100, 120, 120, 130, 140, 150, 160, 170, 180, 190, 200, 300, 400, 500, 600, 700, 800, 900, 1000 micrograms or at least or at most those amounts of dried dye are provided in kits. In such embodiments, dye may then be resuspended in any suitable solvent, such as DMSO.

[0333] In some embodiments, kits may include instructions for employing kit components as well as the use of any other reagent not included in the kit. Instructions may include variations that may be implemented.

### Devices

[0334] In some embodiments, AADC compounds and/or AADC compositions of the present disclosure may be combined with, coated onto or embedded in a device. Devices may include, but are not limited to stents, pumps, and/or other implantable therapeutic devices. Additionally AADC compounds and/or AADC compositions may be delivered to a subject while the subject is using a compression device such as, but not limited to, a compression device to reduce the chances of deep vein thrombosis (DVT) in a subject.

[0335] In some embodiments, AADC compounds and/or AADC compositions of the present invention may be delivered using a device such as, but not limited to, a stent, a tube, a catheter, a pipe, a straw, needle and/or a duct. Methods of using these devices are described herein and are known in the art.

[0336] The present disclosure provides for devices which may incorporate viral vectors that encode one or more AADC polynucleotide payload molecules. These devices contain in a stable formulation the viral vectors which may be immediately delivered to a subject in need thereof, such as a human patient.

[0337] Devices for administration may be employed to deliver the viral vectors comprising an AADC polynucleotide of the present disclosure according to single, multi- or split-dosing regimens taught herein.

[0338] Methods and devices known in the art for multi-administration to cells, organs and tissues are contemplated for use in conjunction with the methods and compositions disclosed herein as embodiments of the present invention. These include, for example, those methods and devices having multiple needles, hybrid devices employing for example lumens or catheters as well as devices utilizing heat, electric current or radiation driven mechanisms.

[0339] The polynucleotides of the present disclosure may be used in the treatment, prophylaxis, palliation or amelioration of any disease or disorder characterized by aberrant or undesired target expression.

[0340] In one embodiment, the AADC polynucleotides of the present invention may be administered to a subject using delivery systems which integrate image guided therapy and integrate imaging such as, but not limited to, laser, MRgFUS, endoscopic and robotic surgery devices.

[0341] In one embodiment, the AADC polynucleotides of the present invention may be administered to a subject using the CLEARPOINT® neuro intervention system by MRI Interventions, Inc. The CLEARPOINT® neuro intervention system may be used alone or in combination with any of the other administration methods and devices described herein. The CLEARPOINT® neuro intervention system helps to provide stereotactic guidance in the placement and operation of instruments or devices during the planning and operation of neurological procedures.

[0342] In one embodiment, the AADC polynucleotides of the present invention may be administered to a subject using the NEUROMATE® stereotactic robot system by Renishaw PLC. The NEUROMATE® system may be used alone or in combination with any of the other administration methods and devices described herein. As a non-limiting example, the NEUROMATE® system may be used with head holders, CT image localizers, frame attachments, remote controls and software.

[0343] In one embodiment, the AADC polynucleotides of the present invention may be administered to a subject using the Elekta MICRODRIVE™ device by Elekta AB. The MICRODRIVE™ device may be used alone or in combination with any of the other administration methods and devices described herein. As a non-limiting example, the MICRODRIVE™ device may be used to position electrodes (e.g., for micro electrode recording (MER), macro stimulation and deep brain stimulation (DBS) electrode implantation), implantation of catheters, tubes or DBS electrodes using cross-hair and A-P holders to verify position, biopsies, injections and aspirations, brain lesioning, endoscope guidance and GAMMA KNIFE® radiosurgery.

[0344] In one embodiment, the AADC polynucleotides of the present invention may be administered to a subject using the AXIIIS® stereotactic miniframe by MONTERIS® Medical, Inc. The AXIIIS® stereotactic miniframe may be used alone or in combination with any of the other administration methods and devices described herein. The AXIIIS® stereotactic miniframe is a trajectory alignment device which may be used for laser coagulation, biopsies, catheter placement, electrode implant, endoscopy, and clot evacuation. The miniframe allows for 360 degree interface and provides access to multiple intracranial targets with a simple adjustment. Further, the miniframe is compatible with MRI.

[0345] In one embodiment, the AADC polynucleotides of the present invention may be administered to a subject using the INTEGRA™ CRW® system by Integra LifeSciences Corporation. The INTEGRA™ CRW® system may be used alone or in combination with any of the other administration methods and devices described herein. The CRW® system may be used for various applications such as, but not limited to, stereotactic surgery, microsurgery, catheterization and biopsy. The CRW® system is designed to provide accuracy to those who use the system (e.g., thumb lock screws, Vernier scaling, double bolt fixation, and a solid frame).

[0346] In one embodiment, the AADC polynucleotides of the present invention may be administered to a subject using the EPOCH® solution system by Stereotaxis, Inc. which may include the NIOBE® ES magnetic navigation system, the VDRIVE® robotic navigation system and/or the ODYSSEY® information solution (all by Stereotaxis, Inc.). The EPOCH® solution system may be used alone or in combination with any of the other administration methods and devices described herein. As a non-limiting example, the NIOBE® ES magnetic navigation system may be used to accurately contact a subject. As another non-limiting example the NIOBE® ES magnetic system may be used with the VDRIVE® robotic navigation system to provide precise movement and stability.

[0347] In one embodiment, the AADC polynucleotides of the present invention may be administered to a subject using the STEALTHSTATION® TREON™ Navigation system from Medtronic as described in Hwu, W. L., et al., 2012. Gene therapy for aromatic L-amino acid decarboxylase deficiency. Sci. Transl. Med. Vol. 4, 134ra61. The StealthStation® TREON™ system allows for the use of pre-surgery images from X-ray, CT, MRI or ultrasound and combines them with real-time images taken by LED cameras during the surgery to assist in guiding the surgeon to the desired target site in the brain or spinal cord.

[0348] In one embodiment, the AADC polynucleotides of the present invention may be administered to a subject using a NeuroStation workstation which uses frameless stereotactic methods to provide image-guidance for applications such as, but not limited to, surgical planning, biopsies, craniotomies, endoscopy, intra-operative ultrasound and radiation therapy.

[0349] In one embodiment, the AADC polynucleotides of the present invention may be administered to a subject using a robotic stereotaxis system such as, but not limited to the device described in U.S. Pat. No. 5,078,140, the contents of which are herein incorporated by reference in their entirety. The robotic arm of the device may be used to precisely orient the surgical tools or other implements used to conduct a procedure.

[0350] In one embodiment, the AADC polynucleotides of the present invention may be administered to a subject using an automatic delivery system such as, but not limited to the device described in U.S. Pat. No. 5,865,744, the contents of which are herein incorporated by reference in their entirety. Based on the images gathered by the delivery system, the computer adjusts the administration of the needle to be the appropriate depth for the particular subject.

[0351] In one embodiment, the AADC polynucleotides of the present invention may be administered to a subject who is simultaneously using during administration, and/or uses for a period of time before and/or after administration a compression device such as, but not limited to, a compression device which reduces the chances of deep vein thrombosis (DVT) in a subject. The compression device may be used for at least 5 minutes, 15 minutes, 30 minutes, 45 minutes, 1 hour, 2 hours, 3 hours, 4 hours, 5 hours, 6 hours, 7 hours, 8 hours, or more than 8 hours before a subject is administered the AADC polynucleotides. The compression device may be used for at least 5 minutes, 15 minutes, 30 minutes, 45 minutes, 1 hour, 2 hours, 3 hours, 4 hours, 5 hours, 6 hours, 7 hours, 8 hours, 9 hours, 10 hours, 11 hours, 12 hours, 13 hours, 14 hours, 15 hours, 16 hours, 17 hours, 18 hours, 19 hours, 20 hours, 21 hours, 22 hours, 23 hours, 1 day, 2 days, 3 days, 4 days, 5 days, 6 days, 1 week, 2 weeks, 3 weeks or a month after the AADC polynucleotides are administered. As a non-limiting example, the compression device is used simultaneously during the procedure of the delivery of the AADC polynucleotides. As another non-limiting example, the compression device is used before the administration of the AADC polynucleotides. As another non-limiting example, the compression device is used after administration of the AADC polynucleotides. As another non-limiting example, the compression device is used before, during and after administration of the AADC polynucleotides.

[0352] Non-limiting examples, of compression devices include ActiveCare+S.F.T. intermittent compression device, ActiveCare+S.F.T pneumatic compression device, DVTlite's Venowave, KCl system compression pump, Aircast VenaFlow system, SCD Express Compression System or Bio Compression Systems, Inc. pneumatic compression therapy equipment (e.g., the pump may be selected from Model SC-2004, Model SC-2004-FC, Model SC-3004, Model SC-3004-FC, Model SC-2008, Model SC-2008-DL, Model SC-3008-T, the BioCryo system, Model IC-BAP-DL or multi-flo DVT combo IC_1545-DL and the garment used with the pump may be a 4 chamber, 8 chamber, BioCryo, Multi-Flo or BioArterial garment).

### Definitions

[0353] At various places in the present specification, substituents of compounds of the present disclosure are disclosed in groups or in ranges. It is specifically intended that the present disclosure include each and every individual sub-combination of the members of such groups and ranges. The following is a non-limiting list of term definitions.

[0354] Adeno-associated virus: The term “adeno-associated virus” or “AAV” as used herein refers to members of the dependovirus genus comprising any particle, sequence, gene, protein, or component derived therefrom. The term “AAV particle” as used herein comprises a capsid and a polynucleotide. The AAV particle may be derived from any serotype, described herein or known in the art, including combinations of serotypes (i.e., “pseudotyped” AAV) or from various genomes (e.g., single stranded or self-complementary). In addition, the AAV particle may be replication defective and/or targeted.

[0355] Activity: As used herein, the term “activity” refers to the condition in which things are happening or being done. Compositions described herein may have activity and this activity may involve one or more biological events.

[0356] Administered in combination: As used herein, the term “administered in combination” or “combined administration” refers to simultaneous exposure to two or more agents (e.g., AAV) administered at the same time or within an interval such that the subject is at some point in time simultaneously exposed to both and/or such that there may be an overlap in the effect of each agent on the patient. In some embodiments, at least one dose of one or more agents is administered within about 24 hours, 12 hours, 6 hours, 3 hours, 1 hour, 30 minutes, 15 minutes, 10 minutes, 5 minutes, or 1 minute of at least one dose of one or more other agents. In some embodiments, administration occurs in overlapping dosage regimens. As used herein, the term “dosage regimen” refers to a plurality of doses spaced apart in time. Such doses may occur at regular intervals or may include one or more hiatus in administration. In some embodiments, the administration of individual doses of one or more compounds and/or compositions of the present invention, as described herein, are spaced sufficiently closely together such that a combinatorial (e.g., a synergistic) effect is achieved.

[0357] Amelioration: As used herein, the term “amelioration” or “ameliorating” refers to a lessening of severity of at least one indicator of a condition or disease. For example, in the context of neurodegeneration disorder, amelioration includes the reduction of neuron loss.

[0358] Animal: As used herein, the term “animal” refers to any member of the animal kingdom. In some embodiments, “animal” refers to humans at any stage of development. In some embodiments, “animal” refers to non-human animals at any stage of development. In certain embodiments, the non-human animal is a mammal (e.g., a rodent, a mouse, a rat, a rabbit, a monkey, a dog, a cat, a sheep, cattle, a primate, or a pig). In some embodiments, animals include, but are not limited to, mammals, birds, reptiles, amphibians, fish, and worms. In some embodiments, the animal is a transgenic animal, genetically-engineered animal, or a clone.

[0359] Antisense strand: As used herein, the term “the antisense strand” or “the first strand” or “the guide strand” of a siRNA molecule refers to a strand that is substantially complementary to a section of about 10-50 nucleotides, e.g., about 15-30, 16-25, 18-23 or 19-22 nucleotides of the mRNA of the gene targeted for silencing. The antisense strand or first strand has sequence sufficiently complementary to the desired target mRNA sequence to direct target-specific silencing, e.g., complementarity sufficient to trigger the destruction of the desired target mRNA by the RNAi machinery or process.

[0360] Approximately: As used herein, the term “approximately” or “about,” as applied to one or more values of interest, refers to a value that is similar to a stated reference value. In certain embodiments, the term “approximately” or “about” refers to a range of values that fall within 25%, 20%, 19%, 18%, 17%, 16%, 15%, 14%, 13%, 12%, 11%, 10%, 9%, 8%, 7%, 6%, 5%, 4%, 3%, 2%, 1%, or less in either direction (greater than or less than) of the stated reference value unless otherwise stated or otherwise evident from the context (except where such number would exceed 100% of a possible value).

[0361] Associated with: As used herein, the terms “associated with,” “conjugated,” “linked,” “attached,” and “tethered,” when used with respect to two or more moieties, mean that the moieties are physically associated or connected with one another, either directly or via one or more additional moieties that serve as linking agents, to form a structure that is sufficiently stable so that the moieties remain physically associated under the conditions in which the structure is used, e.g., physiological conditions. An “association” need not be strictly through direct covalent chemical bonding. It may also suggest ionic or hydrogen bonding or a hybridization based connectivity sufficiently stable such that the “associated” entities remain physically associated.

[0362] Biomolecule: As used herein, the term “biomolecule” is any natural molecule which is amino acid-based, nucleic acid-based, carbohydrate-based or lipid-based, and the like.

[0363] Biologically active: As used herein, the phrase “biologically active” refers to a characteristic of any substance (e.g., an AAV) that has activity in or on a biological system and/or organism. For instance, a substance that, when administered to an organism, has a biological effect on that organism, is considered to be biologically active. In particular embodiments, a compounds and/or compositions of the present disclosure may be considered biologically active if even a portion of is biologically active or mimics an activity considered to biologically relevant.

[0364] Biological system: As used herein, the term “biological system” refers to a group of organs, tissues, cells, intracellular components, proteins, nucleic acids, molecules (including, but not limited to biomolecules) that function together to perform a certain biological task within cellular membranes, cellular compartments, cells, tissues, organs, organ systems, multicellular organisms, or any biological entity. In some embodiments, biological systems are cell signaling pathways comprising intracellular and/or extracellular cell signaling biomolecules. In some embodiments, biological systems comprise growth factor signaling events within the extracellular/cellular matrix and/or cellular niches.

[0365] Complementary and substantially complementary: As used herein, the term “complementary” refers to the ability of polynucleotides to form base pairs with one another. Base pairs are typically formed by hydrogen bonds between nucleotide units in antiparallel polynucleotide strands. Complementary polynucleotide strands can form base pairs in the Watson-Crick manner (e.g., A to T, A to U, C to G), or in any other manner that allows for the formation of duplexes. As persons skilled in the art are aware, when using RNA as opposed to DNA, uracil rather than thymine is the base that is considered to be complementary to adenosine. However, when a U is denoted in the context of the present invention, the ability to substitute a T is implied, unless otherwise stated. Perfect complementarity or 100% complementarity refers to the situation in which each nucleotide unit of one polynucleotide strand can form a hydrogen bond with a nucleotide unit of a second polynucleotide strand. Less than perfect complementarity refers to the situation in which some, but not all, nucleotide units of two strands can form hydrogen bonds with each other. For example, for two 20-mers, if only two base pairs on each strand can form hydrogen bonds with each other, the polynucleotide strands exhibit 10% complementarity. In the same example, if 18 base pairs on each strand can form hydrogen bonds with each other, the polynucleotide strands exhibit 90% complementarity. As used herein, the term “substantially complementary” means that the siRNA has a sequence (e.g., in the antisense strand) which is sufficient to bind the desired target mRNA, and to trigger the RNA silencing of the target mRNA.

[0366] Compound: As used herein, the term “compound,” refers to a distinct chemical entity. In some embodiments, a particular compound may exist in one or more isomeric or isotopic forms (including, but not limited to stereoisomers, geometric isomers and isotopes). In some embodiments, a compound is provided or utilized in only a single such form. In some embodiments, a compound is provided or utilized as a mixture of two or more such forms (including, but not limited to a racemic mixture of stereoisomers). Those of skill in the art appreciate that some compounds exist in different such forms, show different properties and/or activities (including, but not limited to biological activities). In such cases it is within the ordinary skill of those in the art to select or avoid particular forms of the compound for use in accordance with the present invention. For example, compounds that contain asymmetrically substituted carbon atoms can be isolated in optically active or racemic forms. Methods on how to prepare optically active forms from optically active starting materials are known in the art, such as by resolution of racemic mixtures or by stereoselective synthesis.

[0367] Conserved: As used herein, the term “conserved” refers to nucleotides or amino acid residues of polynucleotide or polypeptide sequences, respectively, that are those that occur unaltered in the same position of two or more sequences being compared. Nucleotides or amino acids that are relatively conserved are those that are conserved among more related sequences than nucleotides or amino acids appearing elsewhere in the sequences.

[0368] In some embodiments, two or more sequences are said to be “completely conserved” if they are 100% identical to one another. In some embodiments, two or more sequences are said to be “highly conserved” if they are at least 70% identical, at least 80% identical, at least 90% identical, or at least 95% identical to one another. In some embodiments, two or more sequences are said to be “highly conserved” if they are about 70% identical, about 80% identical, about 90% identical, about 95%, about 98%, or about 99% identical to one another. In some embodiments, two or more sequences are said to be “conserved” if they are at least 30% identical, at least 40% identical, at least 50% identical, at least 60% identical, at least 70% identical, at least 80% identical, at least 90% identical, or at least 95% identical to one another. In some embodiments, two or more sequences are said to be “conserved” if they are about 30% identical, about 40% identical, about 50% identical, about 60% identical, about 70% identical, about 80% identical, about 90% identical, about 95% identical, about 98% identical, or about 99% identical to one another. Conservation of sequence may apply to the entire length of an oligonucleotide or polypeptide or may apply to a portion, region or feature thereof.

[0369] In one embodiment, conserved sequences are not contiguous. Those skilled in the art are able to appreciate how to achieve alignment when gaps in contiguous alignment are present between sequences, and to align corresponding residues not withstanding insertions or deletions present.

[0370] Delivery: As used herein, “delivery” refers to the act or manner of delivering parvovirus, e.g. an AAV and/or AAV compound, substance, entity, moiety, cargo or payload to a target. Such target may be a cell, tissue, organ, organism, or system (whether biological or production).

[0371] Delivery Agent: As used herein, “delivery agent” refers to any agent which facilitates, at least in part, the delivery of one or more substances (including, but not limited to a compounds and/or compositions of the present invention, e.g., viral particles or expression vectors) to targeted cells.

[0372] Destabilized: As used herein, the term “destable,” “destabilize,” or “destabilizing region” means a region or molecule that is less stable than a starting, reference, wild-type or native form of the same region or molecule.

[0373] Detectable label: As used herein, “detectable label” refers to one or more markers, signals, or moieties which are attached, incorporated or associated with another entity, which markers, signals or moieties are readily detected by methods known in the art including radiography, fluorescence, chemiluminescence, enzymatic activity, absorbance, immunological detection and the like. Detectable labels may include radioisotopes, fluorophores, chromophores, enzymes, dyes, metal ions, ligands, biotin, avidin, streptavidin and haptens, quantum dots, polyhistidine tags, myc tags, flag tags, human influenza hemagglutinin (HA) tags and the like. Detectable labels may be located at any position in the entity with which they are attached, incorporated or associated. For example, when attached, incorporated in or associated with a peptide or protein, they may be within the amino acids, the peptides, or proteins, or located at the N- or C-termini.

[0374] Effective amount: As used herein, the term “effective amount” of an agent is that amount sufficient to effect beneficial or desired results, for example, upon single or multiple dose administration to a subject cell, in curing, alleviating, relieving or improving one or more symptoms of a disorder and, as such, an “effective amount” depends upon the context in which it is being applied. For example, in the context of administering an agent that treats ALS, an effective amount of an agent is, for example, an amount sufficient to achieve treatment, as defined herein, of ALS, as compared to the response obtained without administration of the agent.

[0375] Engineered: As used herein, embodiments are “engineered” when they are designed to have a feature or property, whether structural or chemical, that varies from a starting point, wild-type or native molecule. Thus, engineered agents or entities are those whose design and/or production include an act of the hand of man.

[0376] Epitope: As used herein, an “epitope” refers to a surface or region on a molecule that is capable of interacting with a biomolecule. For example a protein may contain one or more amino acids, e.g., an epitope, which interacts with an antibody, e.g., a biomolecule. In some embodiments, when referring to a protein or protein module, an epitope may comprise a linear stretch of amino acids or a three dimensional structure formed by folded amino acid chains.

[0377] Expression: As used herein, “expression” of a nucleic acid sequence refers to one or more of the following events: (1) production of an RNA template from a DNA sequence (e.g., by transcription); (2) processing of an RNA transcript (e.g., by splicing, editing, 5′ cap formation, and/or 3′ end processing); (3) translation of an RNA into a polypeptide or protein; (4) folding of a polypeptide or protein; and (5) post-translational modification of a polypeptide or protein.

[0378] Feature: As used herein, a “feature” refers to a characteristic, a property, or a distinctive element.

[0379] Formulation: As used herein, a “formulation” includes at least a compound and/or composition of the present disclosure (e.g., a vector, AAV particle, etc.) and a delivery agent.

[0380] Fragment. A “fragment,” as used herein, refers to a contiguous portion of a whole. For example, fragments of proteins may comprise polypeptides obtained by digesting full-length protein isolated from cultured cells. In some embodiments, a fragment of a protein includes at least 3, 4, 5, 6, 7, 8, 9, 10, 11, 12, 13, 14, 15, 16, 17, 18, 19, 20, 25, 30, 35, 40, 45, 50, 55, 60, 65, 70, 75, 80, 85, 90, 95, 100, 150, 200, 250 or more amino acids. In some embodiments, fragments of an antibody include portions of an antibody subjected to enzymatic digestion or synthesized as such.

[0381] Functional: As used herein, a “functional” biological molecule is a biological entity with a structure and in a form in which it exhibits a property and/or activity by which it is characterized.

[0382] Gene expression: The term “gene expression” refers to the process by which a nucleic acid sequence undergoes successful transcription and in most instances translation to produce a protein or peptide. For clarity, when reference is made to measurement of “gene expression”, this should be understood to mean that measurements may be of the nucleic acid product of transcription, e.g., RNA or mRNA or of the amino acid product of translation, e.g., polypeptides or peptides. Methods of measuring the amount or levels of RNA, mRNA, polypeptides and peptides are well known in the art.

[0383] Homology: As used herein, the term “homology” refers to the overall relatedness between polymeric molecules, e.g. between nucleic acid molecules (e.g. DNA molecules and/or RNA molecules) and/or between polypeptide molecules. In some embodiments, polymeric molecules are considered to be “homologous” to one another if their sequences are at least 25%, 30%, 35%, 40%, 45%, 50%, 55%, 60%, 65%, 70%, 75%, 80%, 85%, 90%, 95%, or 99% identical or similar. The term “homologous” necessarily refers to a comparison between at least two sequences (polynucleotide or polypeptide sequences). In accordance with the invention, two polynucleotide sequences are considered to be homologous if the polypeptides they encode are at least about 50%, 60%, 70%, 80%, 90%, 95%, or even 99% for at least one stretch of at least about 20 amino acids. In some embodiments, homologous polynucleotide sequences are characterized by the ability to encode a stretch of at least 4-5 uniquely specified amino acids. For polynucleotide sequences less than 60 nucleotides in length, homology is typically determined by the ability to encode a stretch of at least 4-5 uniquely specified amino acids. In accordance with the invention, two protein sequences are considered to be homologous if the proteins are at least about 50%, 60%, 70%, 80%, or 90% identical for at least one stretch of at least about 20 amino acids. In many embodiments, homologous protein may show a large overall degree of homology and a high degree of homology over at least one short stretch of at least 3, 4, 5, 6, 7, 8, 9, 10, 11, 12, 13, 14, 15, 16, 17, 18, 19, 20, 25, 30, 35, 40, 45, 50 or more amino acids. In many embodiments, homologous proteins share one or more characteristic sequence elements. As used herein, the term “characteristic sequence element” refers to a motif present in related proteins. In some embodiments, the presence of such motifs correlates with a particular activity (such as biological activity).

[0384] Identity: As used herein, the term “identity” refers to the overall relatedness between polymeric molecules, e.g., between oligonucleotide molecules (e.g. DNA molecules and/or RNA molecules) and/or between polypeptide molecules. Calculation of the percent identity of two polynucleotide sequences, for example, may be performed by aligning the two sequences for optimal comparison purposes (e.g., gaps can be introduced in one or both of a first and a second nucleic acid sequences for optimal alignment and non-identical sequences can be disregarded for comparison purposes). In certain embodiments, the length of a sequence aligned for comparison purposes is at least 30%, at least 40%, at least 50%, at least 60%, at least 70%, at least 80%, at least 90%, at least 95%, or 100% of the length of the reference sequence. The nucleotides at corresponding nucleotide positions are then compared. When a position in the first sequence is occupied by the same nucleotide as the corresponding position in the second sequence, then the molecules are identical at that position. The percent identity between the two sequences is a function of the number of identical positions shared by the sequences, taking into account the number of gaps, and the length of each gap, which needs to be introduced for optimal alignment of the two sequences. The comparison of sequences and determination of percent identity between two sequences can be accomplished using a mathematical algorithm. For example, the percent identity between two nucleotide sequences can be determined using methods such as those described in Computational Molecular Biology, Lesk, A. M., ed., Oxford University Press, New York, 1988; Biocomputing: Informatics and Genome Projects, Smith, D. W., ed., Academic Press, New York, 1993; Sequence Analysis in Molecular Biology, von Heinje, G., Academic Press, 1987; Computer Analysis of Sequence Data, Part I, Griffin, A. M., and Griffin, H. G., eds., Humana Press, New Jersey, 1994; and Sequence Analysis Primer, Gribskov, M. and Devereux, J., eds., M Stockton Press, New York, 1991; each of which is incorporated herein by reference in its entirety. For example, the percent identity between two nucleotide sequences can be determined, for example using the algorithm of Meyers and Miller (CABIOS, 1989, 4:11-17), which has been incorporated into the ALIGN program (version 2.0) using a PAM120 weight residue table, a gap length penalty of 12 and a gap penalty of 4. The percent identity between two nucleotide sequences can, alternatively, be determined using the GAP program in the GCG software package using an NWSgapdna.CMP matrix. Methods commonly employed to determine percent identity between sequences include, but are not limited to those disclosed in Carillo, H., and Lipman, D., SIAM J Applied Math., 48:1073 (1988); incorporated herein by reference in its entirety. Techniques for determining identity are codified in publicly available computer programs. Computer software to determine homology between two sequences include, but are not limited to, GCG program package, Devereux, J., et al., Nucleic Acids Research, 12(1), 387 (1984), BLASTP, BLASTN, and FASTA Altschul, S. F. et al., J. Molec. Biol., 215, 403 (1990).

[0385] Inhibit expression of a gene: As used herein, the phrase “inhibit expression of a gene” means to cause a reduction in the amount of an expression product of the gene. The expression product may be RNA transcribed from the gene (e.g. mRNA) or a polypeptide translated from mRNA transcribed from the gene. Typically a reduction in the level of mRNA results in a reduction in the level of a polypeptide translated therefrom. The level of expression may be determined using standard techniques for measuring mRNA or protein.

[0386] In vitro: As used herein, the term “in vitro” refers to events that occur in an artificial environment, e.g., in a test tube or reaction vessel, in cell culture, in a Petri dish, etc., rather than within an organism (e.g., animal, plant, or microbe).

[0387] In vivo: As used herein, the term “in vivo” refers to events that occur within an organism (e.g., animal, plant, or microbe or cell or tissue thereof).

[0388] Isolated: As used herein, the term “isolated” is synonymous with “separated”, but carries with it the inference separation was carried out by the hand of man. In one embodiment, an isolated substance or entity is one that has been separated from at least some of the components with which it was previously associated (whether in nature or in an experimental setting). Isolated substances may have varying levels of purity in reference to the substances from which they have been associated. Isolated substances and/or entities may be separated from at least about 10%, about 20%, about 30%, about 40%, about 50%, about 60%, about 70%, about 80%, about 90%, or more of the other components with which they were initially associated. In some embodiments, isolated agents are more than about 80%, about 85%, about 90%, about 91%, about 92%, about 93%, about 94%, about 95%, about 96%, about 97%, about 98%, about 99%, or more than about 99% pure. As used herein, a substance is “pure” if it is substantially free of other components.

[0389] Substantially isolated: By “substantially isolated” is meant that the compound is substantially separated from the environment in which it was formed or detected. Partial separation can include, for example, a composition enriched in the compound of the present disclosure. Substantial separation can include compositions containing at least about 50%, at least about 60%, at least about 70%, at least about 80%, at least about 90%, at least about 95%, at least about 97%, or at least about 99% by weight of the compound of the present disclosure, or salt thereof. Methods for isolating compounds and their salts are routine in the art. In some embodiments, isolation of a substance or entity includes disruption of chemical associations and/or bonds. In some embodiments, isolation includes only the separation from components with which the isolated substance or entity was previously combined and does not include such disruption.

[0390] Modified: As used herein, the term “modified” refers to a changed state or structure of a molecule or entity as compared with a parent or reference molecule or entity. Molecules may be modified in many ways including chemically, structurally, and functionally. In some embodiments, compounds and/or compositions of the present disclosure are modified by the introduction of non-natural amino acids, or non-natural nucleotides.

[0391] Mutation: As used herein, the term “mutation” refers to a change and/or alteration. In some embodiments, mutations may be changes and/or alterations to proteins (including peptides and polypeptides) and/or nucleic acids (including polynucleic acids). In some embodiments, mutations comprise changes and/or alterations to a protein and/or nucleic acid sequence. Such changes and/or alterations may comprise the addition, substitution and or deletion of one or more amino acids (in the case of proteins and/or peptides) and/or nucleotides (in the case of nucleic acids and or polynucleic acids). In embodiments wherein mutations comprise the addition and/or substitution of amino acids and/or nucleotides, such additions and/or substitutions may comprise 1 or more amino acid and/or nucleotide residues and may include modified amino acids and/or nucleotides.

[0392] Naturally occurring: As used herein, “naturally occurring” means existing in nature without artificial aid, or involvement of the hand of man.

[0393] Non-human vertebrate: As used herein, a “non-human vertebrate” includes all vertebrates except Homo sapiens, including wild and domesticated species. Examples of non-human vertebrates include, but are not limited to, mammals, such as alpaca, banteng, bison, camel, cat, cattle, deer, dog, donkey, gayal, goat, guinea pig, horse, llama, mule, pig, rabbit, reindeer, sheep water buffalo, and yak.

[0394] Nucleic acid: As used herein, the term “nucleic acid”, “polynucleotide” and “oligonucleotide” refer to any nucleic acid polymers composed of either polydeoxyribonucleotides (containing 2-deoxy-D-ribose), or polyribonucleotides (containing D-ribose), or any other type of polynucleotide which is an N glycoside of a purine or pyrimidine base, or modified purine or pyrimidine bases. There is no intended distinction in length between the term “nucleic acid”, “polynucleotide” and “oligonucleotide”, and these terms will be used interchangeably. These terms refer only to the primary structure of the molecule. Thus, these terms include double- and single-stranded DNA, as well as double- and single stranded RNA.

[0395] Off-target: As used herein, “off target” refers to any unintended effect on any one or more target, gene and/or cellular transcript.

[0396] Operably linked. As used herein, the phrase “operably linked” refers to a functional connection between two or more molecules, constructs, transcripts, entities, moieties or the like.

[0397] Particle: As used herein, a “particle” is a virus comprised of at least two components, a protein capsid and a polynucleotide sequence enclosed within the capsid.

[0398] Patient: As used herein, “patient” refers to a subject who may seek or be in need of treatment, requires treatment, is receiving treatment, will receive treatment, or a subject who is under care by a trained (e.g., licensed) professional for a particular disease or condition.

[0399] Payload: As used herein, “payload” refers to one or more polynucleotides or polynucleotide regions encoded by or within a viral genome or an expression product of such polynucleotide or polynucleotide region, e.g., a transgene, a polynucleotide encoding a polypeptide or multi-polypeptide or a modulatory nucleic acid or regulatory nucleic acid.

[0400] Payload construct: As used herein, “payload construct” is one or more polynucleotide regions encoding or comprising a payload that is flanked on one or both sides by an inverted terminal repeat (ITR) sequence. The payload construct is a template that is replicated in a viral production cell to produce a viral genome.

[0401] Payload construct vector: As used herein, “payload construct vector” is a vector encoding or comprising a payload construct, and regulatory regions for replication and expression in bacterial cells.

[0402] Payload construct expression vector: As used herein, a “payload construct expression vector” is a vector encoding or comprising a payload construct and which further comprises one or more polynucleotide regions encoding or comprising components for viral expression in a viral replication cell.

[0403] Peptide: As used herein, the term “peptide” refers to a chain of amino acids that is less than or equal to about 50 amino acids long, e.g., about 5, 10, 15, 20, 25, 30, 35, 40, 45, or 50 amino acids long.

[0404] Pharmaceutically acceptable: The phrase “pharmaceutically acceptable” is employed herein to refer to those compounds, materials, compositions, and/or dosage forms which are, within the scope of sound medical judgment, suitable for use in contact with the tissues of human beings and animals without excessive toxicity, irritation, allergic response, or other problem or complication, commensurate with a reasonable benefit/risk ratio.

[0405] Pharmaceutically acceptable excipients: As used herein, the term “pharmaceutically acceptable excipient,” as used herein, refers to any ingredient other than active agents (e.g., as described herein) present in pharmaceutical compositions and having the properties of being substantially nontoxic and non-inflammatory in subjects. In some embodiments, pharmaceutically acceptable excipients are vehicles capable of suspending and/or dissolving active agents. Excipients may include, for example: antiadherents, antioxidants, binders, coatings, compression aids, disintegrants, dyes (colors), emollients, emulsifiers, fillers (diluents), film formers or coatings, flavors, fragrances, glidants (flow enhancers), lubricants, preservatives, printing inks, sorbents, suspending or dispersing agents, sweeteners, and waters of hydration. Excipients include, but are not limited to: butylated hydroxytoluene (BHT), calcium carbonate, calcium phosphate (dibasic), calcium stearate, croscarmellose, crosslinked polyvinyl pyrrolidone, citric acid, crospovidone, cysteine, ethylcellulose, gelatin, hydroxypropyl cellulose, hydroxypropyl methylcellulose, lactose, magnesium stearate, maltitol, mannitol, methionine, methylcellulose, methyl paraben, microcrystalline cellulose, polyethylene glycol, polyvinyl pyrrolidone, povidone, pregelatinized starch, propyl paraben, retinyl palmitate, shellac, silicon dioxide, sodium carboxymethyl cellulose, sodium citrate, sodium starch glycolate, sorbitol, starch (corn), stearic acid, sucrose, talc, titanium dioxide, vitamin A, vitamin E, vitamin C, and xylitol.

[0406] Pharmaceutically acceptable salts: Pharmaceutically acceptable salts of the compounds described herein are forms of the disclosed compounds wherein the acid or base moiety is in its salt form (e.g., as generated by reacting a free base group with a suitable organic acid). Examples of pharmaceutically acceptable salts include, but are not limited to, mineral or organic acid salts of basic residues such as amines; alkali or organic salts of acidic residues such as carboxylic acids; and the like. Representative acid addition salts include acetate, adipate, alginate, ascorbate, aspartate, benzenesulfonate, benzoate, bisulfate, borate, butyrate, camphorate, camphorsulfonate, citrate, cyclopentanepropionate, digluconate, dodecylsulfate, ethanesulfonate, fumarate, glucoheptonate, glycerophosphate, hemisulfate, heptonate, hexanoate, hydrobromide, hydrochloride, hydroiodide, 2-hydroxy-ethanesulfonate, lactobionate, lactate, laurate, lauryl sulfate, malate, maleate, malonate, methanesulfonate, 2-naphthalenesulfonate, nicotinate, nitrate, oleate, oxalate, palmitate, pamoate, pectinate, persulfate, 3-phenylpropionate, phosphate, picrate, pivalate, propionate, stearate, succinate, sulfate, tartrate, thiocyanate, toluenesulfonate, undecanoate, valerate salts, and the like. Representative alkali or alkaline earth metal salts include sodium, lithium, potassium, calcium, magnesium, and the like, as well as nontoxic ammonium, quaternary ammonium, and amine cations, including, but not limited to ammonium, tetramethylammonium, tetraethylammonium, methylamine, dimethylamine, trimethylamine, triethylamine, ethylamine, and the like. Pharmaceutically acceptable salts include the conventional non-toxic salts, for example, from non-toxic inorganic or organic acids. In some embodiments a pharmaceutically acceptable salt is prepared from a parent compound which contains a basic or acidic moiety by conventional chemical methods. Generally, such salts can be prepared by reacting the free acid or base forms of these compounds with a stoichiometric amount of the appropriate base or acid in water or in an organic solvent, or in a mixture of the two; generally, nonaqueous media like ether, ethyl acetate, ethanol, isopropanol, or acetonitrile are preferred. Lists of suitable salts are found in Remington's Pharmaceutical Sciences, 17^{th} ed., Mack Publishing Company, Easton, Pa., 1985, p. 1418, Pharmaceutical Salts: Properties, Selection, and Use, P. H. Stahl and C. G. Wermuth (eds.), Wiley-VCH, 2008, and Berge et al., Journal of Pharmaceutical Science, 66, 1-19 (1977), each of which is incorporated herein by reference in its entirety. Pharmaceutically acceptable solvate: The term “pharmaceutically acceptable solvate,” as used herein, refers to a crystalline form of a compound wherein molecules of a suitable solvent are incorporated in the crystal lattice. For example, solvates may be prepared by crystallization, recrystallization, or precipitation from a solution that includes organic solvents, water, or a mixture thereof. Examples of suitable solvents are ethanol, water (for example, mono-, di-, and tri-hydrates), N-methylpyrrolidinone (NMP), dimethyl sulfoxide (DMSO), N,N′-dimethylformamide (DMF), N,N′-dimethylacetamide (DMAC), 1,3-dimethyl-2-imidazolidinone (DMEU), 1,3-dimethyl-3,4,5,6-tetrahydro-2-(1H)-pyrimidinone (DMPU), acetonitrile (ACN), propylene glycol, ethyl acetate, benzyl alcohol, 2-pyrrolidone, benzyl benzoate, and the like. When water is the solvent, the solvate is referred to as a “hydrate.” In some embodiments, the solvent incorporated into a solvate is of a type or at a level that is physiologically tolerable to an organism to which the solvate is administered (e.g., in a unit dosage form of a pharmaceutical composition).

[0407] Pharmacokinetic: As used herein, “pharmacokinetic” refers to any one or more properties of a molecule or compound as it relates to the determination of the fate of substances administered to living organisms. Pharmacokinetics are divided into several areas including the extent and rate of absorption, distribution, metabolism and excretion. This is commonly referred to as ADME where: (A) Absorption is the process of a substance entering the blood circulation; (D) Distribution is the dispersion or dissemination of substances throughout the fluids and tissues of the body; (M) Metabolism (or Biotransformation) is the irreversible transformation of parent compounds into daughter metabolites; and (E) Excretion (or Elimination) refers to the elimination of the substances from the body. In rare cases, some drugs irreversibly accumulate in body tissue.

[0408] Physicochemical: As used herein, “physicochemical” means of or relating to a physical and/or chemical property.

[0409] Preventing: As used herein, the term “preventing” refers to partially or completely delaying onset of an infection, disease, disorder and/or condition; partially or completely delaying onset of one or more symptoms, features, or clinical manifestations of a particular infection, disease, disorder, and/or condition; partially or completely delaying onset of one or more symptoms, features, or manifestations of a particular infection, disease, disorder, and/or condition; partially or completely delaying progression from an infection, a particular disease, disorder and/or condition; and/or decreasing the risk of developing pathology associated with the infection, the disease, disorder, and/or condition.

[0410] Proliferate: As used herein, the term “proliferate” means to grow, expand, replicate or increase or cause to grow, expand, replicate or increase. “Proliferative” means having the ability to proliferate. “Anti-proliferative” means having properties counter to or in opposition to proliferative properties.

[0411] Protein of interest: As used herein, the terms “proteins of interest” or “desired proteins” include those provided herein and fragments, mutants, variants, and alterations thereof.

[0412] Purified: As used herein, the term “purify” means to make substantially pure or clear from unwanted components, material defilement, admixture or imperfection. “Purified” refers to the state of being pure. “Purification” refers to the process of making pure.

[0413] Region: As used herein, the term “region” refers to a zone or general area. In some embodiments, when referring to a protein or protein module, a region may comprise a linear sequence of amino acids along the protein or protein module or may comprise a three dimensional area, an epitope and/or a cluster of epitopes. In some embodiments, regions comprise terminal regions. As used herein, the term “terminal region” refers to regions located at the ends or termini of a given agent. When referring to proteins, terminal regions may comprise N- and/or C-termini. N-termini refer to the end of a protein comprising an amino acid with a free amino group. C-termini refer to the end of a protein comprising an amino acid with a free carboxyl group. N- and/or C-terminal regions may therefore comprise the N- and/or C-termini as well as surrounding amino acids. In some embodiments, N- and/or C-terminal regions comprise from about 3 amino acid to about 30 amino acids, from about 5 amino acids to about 40 amino acids, from about 10 amino acids to about 50 amino acids, from about 20 amino acids to about 100 amino acids and/or at least 100 amino acids. In some embodiments, N-terminal regions may comprise any length of amino acids that includes the N-terminus, but does not include the C-terminus. In some embodiments, C-terminal regions may comprise any length of amino acids, which include the C-terminus, but do not comprise the N-terminus.

[0414] In some embodiments, when referring to a polynucleotide, a region may comprise a linear sequence of nucleic acids along the polynucleotide or may comprise a three dimensional area, secondary structure, or tertiary structure. In some embodiments, regions comprise terminal regions. As used herein, the term “terminal region” refers to regions located at the ends or termini of a given agent. When referring to polynucleotides, terminal regions may comprise 5′ and 3′ termini. 5′ termini refer to the end of a polynucleotide comprising a nucleic acid with a free phosphate group. 3′ termini refer to the end of a polynucleotide comprising a nucleic acid with a free hydroxyl group. 5′ and 3′ regions may there for comprise the 5′ and 3′ termini as well as surrounding nucleic acids. In some embodiments, 5′ and 3′ terminal regions comprise from about 9 nucleic acids to about 90 nucleic acids, from about 15 nucleic acids to about 120 nucleic acids, from about 30 nucleic acids to about 150 nucleic acids, from about 60 nucleic acids to about 300 nucleic acids and/or at least 300 nucleic acids. In some embodiments, 5′ regions may comprise any length of nucleic acids that includes the 5′ terminus, but does not include the 3′ terminus. In some embodiments, 3′ regions may comprise any length of nucleic acids, which include the 3′ terminus, but does not comprise the 5′ terminus.

[0415] RNA or RNA molecule: As used herein, the term “RNA” or “RNA molecule” or “ribonucleic acid molecule” refers to a polymer of ribonucleotides; the term “DNA” or “DNA molecule” or “deoxyribonucleic acid molecule” refers to a polymer of deoxyribonucleotides. DNA and RNA can be synthesized naturally, e.g., by DNA replication and transcription of DNA, respectively; or be chemically synthesized. DNA and RNA can be single-stranded (i.e., ssRNA or ssDNA, respectively) or multi-stranded (e.g., double stranded, i.e., dsRNA and dsDNA, respectively). The term “mRNA” or “messenger RNA”, as used herein, refers to a single stranded RNA that encodes the amino acid sequence of one or more polypeptide chains.

[0416] RNA interference: As used herein, the term “RNA interference” or “RNAi” refers to a sequence specific regulatory mechanism mediated by RNA molecules which results in the inhibition or interference or “silencing” of the expression of a corresponding protein-coding gene.

[0417] Sample: As used herein, the term “sample” refers to an aliquot or portion taken from a source and/or provided for analysis or processing. In some embodiments, a sample is from a biological source such as a tissue, cell or component part (e.g. a body fluid, including but not limited to blood, mucus, lymphatic fluid, synovial fluid, cerebrospinal fluid, saliva, amniotic fluid, amniotic cord blood, urine, vaginal fluid and semen). In some embodiments, a sample may be or comprise a homogenate, lysate or extract prepared from a whole organism or a subset of its tissues, cells or component parts, or a fraction or portion thereof, including but not limited to, for example, plasma, serum, spinal fluid, lymph fluid, the external sections of the skin, respiratory, intestinal, and genitourinary tracts, tears, saliva, milk, blood cells, tumors, organs. In some embodiments, a sample is or comprises a medium, such as a nutrient broth or gel, which may contain cellular components, such as proteins or nucleic acid molecule. In some embodiments, a “primary” sample is an aliquot of the source. In some embodiments, a primary sample is subjected to one or more processing (e.g., separation, purification, etc.) steps to prepare a sample for analysis or other use.

[0418] Self-complementary viral particle: As used herein, a “self-complementary viral particle” is a particle comprised of at least two components, a protein capsid and a polynucleotide sequence encoding a self-complementary genome enclosed within the capsid.

[0419] Sense strand: As used herein, the term “the sense strand” or “the second strand” or “the passenger strand” of a siRNA molecule refers to a strand that is complementary to the antisense strand or first strand. The antisense and sense strands of a siRNA molecule are hybridized to form a duplex structure. As used herein, a “siRNA duplex” includes a siRNA strand having sufficient complementarity to a section of about 10-50 nucleotides of the mRNA of the gene targeted for silencing and a siRNA strand having sufficient complementarity to form a duplex with the siRNA strand.

[0420] Signal Sequences: As used herein, the phrase “signal sequences” refers to a sequence which can direct the transport or localization.

[0421] Single unit dose: As used herein, a “single unit dose” is a dose of any therapeutic administered in one dose/at one time/single route/single point of contact, i.e., single administration event. In some embodiments, a single unit dose is provided as a discrete dosage form (e.g., a tablet, capsule, patch, loaded syringe, vial, etc.).

[0422] Similarity: As used herein, the term “similarity” refers to the overall relatedness between polymeric molecules, e.g. between polynucleotide molecules (e.g. DNA molecules and/or RNA molecules) and/or between polypeptide molecules. Calculation of percent similarity of polymeric molecules to one another can be performed in the same manner as a calculation of percent identity, except that calculation of percent similarity takes into account conservative substitutions as is understood in the art.

[0423] Small/short interfering RNA: As used herein, the term “small/short interfering RNA” or “siRNA” refers to an RNA molecule (or RNA analog) comprising between about 5-60 nucleotides (or nucleotide analogs) which is capable of directing or mediating RNAi. Preferably, a siRNA molecule comprises between about 15-30 nucleotides or nucleotide analogs, more preferably between about 16-25 nucleotides (or nucleotide analogs), even more preferably between about 18-23 nucleotides (or nucleotide analogs), and even more preferably between about 19-22 nucleotides (or nucleotide analogs) (e.g., 19, 20, 21 or 22 nucleotides or nucleotide analogs). The term “short” siRNA refers to a siRNA comprising 5-23 nucleotides, preferably 21 nucleotides (or nucleotide analogs), for example, 19, 20, 21 or 22 nucleotides. The term “long” siRNA refers to a siRNA comprising 24-60 nucleotides, preferably about 24-25 nucleotides, for example, 23, 24, 25 or 26 nucleotides. Short siRNAs may, in some instances, include fewer than 19 nucleotides, e.g., 16, 17 or 18 nucleotides, or as few as 5 nucleotides, provided that the shorter siRNA retains the ability to mediate RNAi. Likewise, long siRNAs may, in some instances, include more than 26 nucleotides, e.g., 27, 28, 29, 30, 35, 40, 45, 50, 55, or even 60 nucleotides, provided that the longer siRNA retains the ability to mediate RNAi or translational repression absent further processing, e.g., enzymatic processing, to a short siRNA. siRNAs can be single stranded RNA molecules (ss-siRNAs) or double stranded RNA molecules (ds-siRNAs) comprising a sense strand and an antisense strand which hybridized to form a duplex structure called siRNA duplex.

[0424] Split dose: As used herein, a “split dose” is the division of single unit dose or total daily dose into two or more doses.

[0425] Stable: As used herein “stable” refers to a compound or entity that is sufficiently robust to survive isolation to a useful degree of purity from a reaction mixture, and preferably capable of formulation into an efficacious therapeutic agent.

[0426] Stabilized: As used herein, the term “stabilize”, “stabilized,” “stabilized region” means to make or become stable. In some embodiments, stability is measured relative to an absolute value. In some embodiments, stability is measured relative to a reference compound or entity.

[0427] Subject: As used herein, the term “subject” or “patient” refers to any organism to which a composition in accordance with the disclosure may be administered, e.g., for experimental, diagnostic, prophylactic, and/or therapeutic purposes. Typical subjects include animals (e.g., mammals such as mice, rats, rabbits, non-human primates, and humans) and/or plants. In some embodiments, the subject may be an infant, neonate, or a child under the age of 12 years old. In some embodiments, the subject may be in utero.

[0428] Substantially: As used herein, the term “substantially” refers to the qualitative condition of exhibiting total or near-total extent or degree of a characteristic or property of interest. One of ordinary skill in the biological arts will understand that biological and chemical phenomena rarely, if ever, go to completion and/or proceed to completeness or achieve or avoid an absolute result. The term “substantially” is therefore used herein to capture the potential lack of completeness inherent in many biological and chemical phenomena.

[0429] Substantially equal: As used herein as it relates to time differences between doses, the term means plus/minus 2%.

[0430] Substantially simultaneously: As used herein and as it relates to plurality of doses, the term typically means within about 2 seconds.

[0431] Suffering from: An individual who is “suffering from” a disease, disorder, and/or condition has been diagnosed with or displays one or more symptoms of a disease, disorder, and/or condition.

[0432] Susceptible to: An individual who is “susceptible to” a disease, disorder, and/or condition has not been diagnosed with and/or may not exhibit symptoms of the disease, disorder, and/or condition but harbors a propensity to develop a disease or its symptoms. In some embodiments, an individual who is susceptible to a disease, disorder, and/or condition (for example, cancer) may be characterized by one or more of the following: (1) a genetic mutation associated with development of the disease, disorder, and/or condition; (2) a genetic polymorphism associated with development of the disease, disorder, and/or condition; (3) increased and/or decreased expression and/or activity of a protein and/or nucleic acid associated with the disease, disorder, and/or condition; (4) habits and/or lifestyles associated with development of the disease, disorder, and/or condition; (5) a family history of the disease, disorder, and/or condition; and (6) exposure to and/or infection with a microbe associated with development of the disease, disorder, and/or condition. In some embodiments, an individual who is susceptible to a disease, disorder, and/or condition will develop the disease, disorder, and/or condition. In some embodiments, an individual who is susceptible to a disease, disorder, and/or condition will not develop the disease, disorder, and/or condition.

[0433] Synthetic: The term “synthetic” means produced, prepared, and/or manufactured by the hand of man. Synthesis of polynucleotides or polypeptides or other molecules of the present disclosure may be chemical or enzymatic.

[0434] Targeting: As used herein, “targeting” means the process of design and selection of nucleic acid sequence that will hybridize to a target nucleic acid and induce a desired effect.

[0435] Targeted Cells: As used herein, “targeted cells” refers to any one or more cells of interest. The cells may be found in vitro, in vivo, in situ or in the tissue or organ of an organism. The organism may be an animal, preferably a mammal, more preferably a human and most preferably a patient.

[0436] Therapeutic Agent: The term “therapeutic agent” refers to any agent that, when administered to a subject has a therapeutic, diagnostic, and/or prophylactic effect and/or elicits a desired biological and/or pharmacological effect.

[0437] Therapeutically effective amount: As used herein, the term “therapeutically effective amount” means an amount of an agent to be delivered (e.g., nucleic acid, drug, therapeutic agent, diagnostic agent, prophylactic agent, etc.) that is sufficient, when administered to a subject suffering from or susceptible to an infection, disease, disorder, and/or condition, to treat, improve symptoms of, diagnose, prevent, and/or delay the onset of the infection, disease, disorder, and/or condition. In some embodiments, a therapeutically effective amount is provided in a single dose. In some embodiments, a therapeutically effective amount is administered in a dosage regimen comprising a plurality of doses. Those skilled in the art will appreciate that in some embodiments, a unit dosage form may be considered to comprise a therapeutically effective amount of a particular agent or entity if it comprises an amount that is effective when administered as part of such a dosage regimen.

[0438] Therapeutically effective outcome: As used herein, the term “therapeutically effective outcome” means an outcome that is sufficient in a subject suffering from or susceptible to an infection, disease, disorder, and/or condition, to treat, improve symptoms of, diagnose, prevent, and/or delay the onset of the infection, disease, disorder, and/or condition.

[0439] Total daily dose: As used herein, a “total daily dose” is an amount given or prescribed in a 24 hr period. It may be administered as a single unit dose.

[0440] Treating: As used herein, the term “treating” refers to partially or completely alleviating, ameliorating, improving, relieving, delaying onset of, inhibiting progression of, reducing severity of, and/or reducing incidence of one or more symptoms or features of a particular infection, disease, disorder, and/or condition. For example, “treating” cancer may refer to inhibiting survival, growth, and/or spread of a tumor. Treatment may be administered to a subject who does not exhibit signs of a disease, disorder, and/or condition and/or to a subject who exhibits only early signs of a disease, disorder, and/or condition for the purpose of decreasing the risk of developing pathology associated with the disease, disorder, and/or condition.

[0441] Unmodified: As used herein, “unmodified” refers to any substance, compound or molecule prior to being changed in any way. Unmodified may, but does not always, refer to the wild-type or native form of a biomolecule or entity. Molecules or entities may undergo a series of modifications whereby each modified product may serve as the “unmodified” starting molecule or entity for a subsequent modification.

[0442] Vector: As used herein, a “vector” is any molecule or moiety which transports, transduces or otherwise acts as a carrier of a heterologous molecule.

[0443] Vectors of the present disclosure may be produced recombinantly and may be based on and/or may comprise adeno-associated virus (AAV) parent or reference sequence. Such parent or reference AAV sequences may serve as an original, second, third or subsequent sequence for engineering vectors. In non-limiting examples, such parent or reference AAV sequences may comprise any one or more of the following sequences: a polynucleotide sequence encoding a polypeptide or multi-polypeptide, which sequence may be wild-type or modified from wild-type and which sequence may encode full-length or partial sequence of a protein, protein domain, or one or more subunits of a protein; a polynucleotide comprising a modulatory or regulatory nucleic acid which sequence may be wild-type or modified from wild-type; and a transgene that may or may not be modified from wild-type sequence. These AAV sequences may serve as either the “donor” sequence of one or more codons (at the nucleic acid level) or amino acids (at the polypeptide level) or “acceptor” sequences of one or more codons (at the nucleic acid level) or amino acids (at the polypeptide level).

[0444] Viral construct vector: As used herein, a “viral construct vector” is a vector which comprises one or more polynucleotide regions encoding or comprising Rep and or Cap protein.

[0445] Viral construct expression vector: As used herein, a “viral construct expression vector” is a vector which comprises one or more polynucleotide regions encoding or comprising Rep and or Cap that further comprises one or more polynucleotide regions encoding or comprising components for viral expression in a viral replication cell.

[0446] Viral genome: As used herein, a “viral genome” is a polynucleotide encoding at least one inverted terminal repeat (ITR), at least one regulatory sequence, and at least one payload. The viral genome is derived by replication of a payload construct from the payload construct expression vector. A viral genome encodes at least one copy of the payload construct.

### EQUIVALENTS AND SCOPE

[0447] Those skilled in the art will recognize, or be able to ascertain using no more than routine experimentation, many equivalents to the specific embodiments in accordance with those explicitly described herein. The scope of the present disclosure is not intended to be limited to the above Description, but rather is as set forth in the appended claims.

[0448] In the claims, articles such as “a,” “an,” and “the” may mean one or more than one unless indicated to the contrary or otherwise evident from the context. Claims or descriptions that include “or” between one or more members of a group are considered satisfied if one, more than one, or all of the group members are present in, employed in, or otherwise relevant to a given product or process unless indicated to the contrary or otherwise evident from the context. The disclosure includes embodiments in which exactly one member of the group is present in, employed in, or otherwise relevant to a given product or process. The disclosure includes embodiments in which more than one, or the entire group members are present in, employed in, or otherwise relevant to a given product or process.

[0449] The term “comprising” is intended to be open and permits but does not require the inclusion of additional elements or steps. When the term “comprising” is used herein, the term “consisting of” is thus also encompassed and disclosed.

[0450] Unless otherwise defined, all technical and scientific terms used herein have the same meaning as commonly understood by one of ordinary skill in the art to which this invention belongs. Methods and materials are described herein for use in the present disclosure; other, suitable methods and materials known in the art can also be used.

[0451] Where ranges are given, endpoints are included. Furthermore, it is to be understood that unless otherwise indicated or otherwise evident from the context and understanding of one of ordinary skill in the art, values that are expressed as ranges can assume any specific value or subrange within the stated ranges in different embodiments of the invention, to the tenth of the unit of the lower limit of the range, unless the context clearly dictates otherwise.

[0452] In addition, it is to be understood that any particular embodiment of the present disclosure that falls within the prior art may be explicitly excluded from any one or more of the claims. Since such embodiments are deemed to be known to one of ordinary skill in the art, they may be excluded even if the exclusion is not set forth explicitly herein. Any particular embodiment of the compositions of the invention (e.g., any nucleic acid or protein encoded thereby; any method of production; any method of use; etc.) can be excluded from any one or more claims, for any reason, whether or not related to the existence of prior art.

[0453] It is to be understood that the words which have been used are words of description rather than limitation, and that changes may be made within the purview of the appended claims without departing from the true scope and spirit of the invention in its broader aspects.

[0454] While the present disclosure has been described at some length and with some particularity with respect to the several described embodiments, it is not intended that it should be limited to any such particulars or embodiments or any particular embodiment, but it is to be construed with references to the appended claims so as to provide the broadest possible interpretation of such claims in view of the prior art and, therefore, to effectively encompass the intended scope of the invention. Section and table headings are not intended to be limiting.

[0455] All cited sources, for example, references, publications, databases, database entries, and art cited herein, are incorporated into this application by reference, even if not expressly stated in the citation. In case of conflicting statements of a cited source and the instant application, the statement in the instant application shall control.

### Examples

### Example 1. Design of AADC Polynucleotides

[0456] AADC polynucleotides are designed to comprise at a minimum a nucleic acid sequence encoding an AADC protein.

[0457] Once designed, the sequence is engineered or synthesized or inserted in a plasmid or vector and administered to a cell or organism. Suitable plasmids or vectors are any which transduce or transfect the target cell.

[0458] Adeno-associated viral vectors (AAV), viral particles or entire viruses may be used.

[0459] Administration results in the processing of the AADC polynucleotide to generate the AADC protein which alters the etiology of the disease being treated or ameliorated.

[0460] In one non-limiting example, plasmids containing an AADC polynucleotide of the invention are given in Table 2. These AADC polynucleotides in the table are contained in a Fastback plasmid and have a CMV promoter and encode AADC. In some embodiments the open reading frame of the AADC protein mRNA is codon optimized (e.g., codop).

TABLE 2
AADC polynucleotide containing plasmids/vectors.

| Construct | SEQ ID NO |
|---|---|
| pFB CMV hAADC-1 | 2 |
| pFB CMV hAADC-2 | 3 |
| pFB CMV hAADC-3 | 4 |
| pFB CMV hAADC-4 | 5 |
| phAADC_1k | 6 |
| phAADC_2k | 7 |
| phAADC_3k | 8 |
| phAADC_4 | 9 |
| phAADC_5k | 10 |
| phAADC_6k | 11 |
| phAADC_9k | 12 |

### Example 2. AADC Polynucleotides: ITR to ITR

[0461] AADC polynucleotides suitable for use in an AAV viral vector include those in Table 3.

[0462] Table 3 provides the ITR to ITR sequences from Table 2.

TABLE 3
ITR to ITR AADC polynucleotides

| Construct | SEQ ID NO |
|---|---|
| pFB CMV hAADC-1 (ITR to ITR) | 13 |
| pFB CMV hAADC-2 (ITR to ITR) | 14 |
| pFB CMV hAADC-3 (ITR to ITR) | 15 |
| pFB CMV hAADC-4 (ITR to ITR) | 16 |
| phAADC_1k (ITR to ITR) | 17 |
| phAADC_2k (ITR to ITR) | 18 |
| phAADC_3k (ITR to ITR) | 19 |
| phAADC_4 (ITR to ITR) | 20 |
| phAADC_5k (ITR to ITR) | 21 |
| phAADC_6k (ITR to ITR) | 22 |
| phAADC_9k (ITR to ITR) | 23 |

### Example 3. Relative to the ITR to ITR parent sequence

[0463] AADC polynucleotides are designed according to Tables 4-6. The start and stop positions given are relative to the ITR to ITR AADC polynucleotides described in Table 3. In Tables 4-6 “--” means the component is not applicable.

TABLE 4
Component modules or sequence
regions of AADC polynucleotides

| | pFB CMV | | pFB CMV | | pFB CMV | | pFB CMV | |
|---|---|---|---|---|---|---|---|---|
| | hAADC-1 | | hAADC-2 | | hAADC-3 | | hAADC-4 | |
| | (ITR to ITR) | | (ITR to ITR) | | (ITR to ITR) | | (ITR to ITR) | |
| | Start | Stop | Start | Stop | Start | Stop | Start | Stop |
| 5′ ITR | 1 | 130 | 1 | 130 | 1 | 130 | 1 | 130 |
| CMV Enhancer | 263 | 566 | 263 | 566 | 263 | 566 | 296 | 599 |
| CMV Promoter | 567 | 769 | 567 | 769 | 567 | 769 | 600 | 802 |
| ie1 exon 1 | 784 | 917 | 784 | 917 | 784 | 917 | 817 | 950 |
| ie1 intron1 | 918 | 949 | 918 | 949 | 918 | 949 | 951 | 982 |
| hBglobin | 950 | 1296 | 950 | 1296 | 950 | 1296 | 983 | 1329 |
| intron2 | | | | | | | | |
| hBglobin | 1297 | 1349 | 1297 | 1349 | 1297 | 1349 | 1330 | 1382 |
| exon 3 | | | | | | | | |
| 5′ UTR | — | — | — | — | — | — | 1398 | 1468 |
| hAADC | 1374 | 2822 | — | — | 1374 | 2822 | 1473 | 2921 |
| hAADC codop | — | — | 1374 | 2816 | — | — | — | — |
| 3′ UTR | — | — | — | — | 2823 | 3221 | 2922 | 3361 |
| hGH poly(A) | 2841 | 3317 | 2835 | 3311 | 3240 | 3716 | 3380 | 3856 |
| signal | | | | | | | | |
| 3′ ITR | 3417 | 3535 | 3416 | 3534 | 3822 | 3940 | 3961 | 4079 |

TABLE 5
Component modules or sequence
regions of AADC polynucleotides

| | hAADC_1k | | hAADC_2k | | hAADC_3k | | hAADC_4 | |
|---|---|---|---|---|---|---|---|---|
| | Start | Stop | Start | Stop | Start | Stop | Start | Stop |
| 5′ ITR | 1 | 141 | 1 | 141 | 1 | 141 | 1 | 141 |
| CMV Enhancer | 245 | 548 | 245 | 548 | 245 | 548 | 245 | 548 |
| CMV Promoter | 549 | 751 | 549 | 751 | 549 | 751 | 549 | 751 |
| ie1 exon 1 | 766 | 899 | 766 | 899 | 766 | 899 | 766 | 899 |
| ie1 intron1 | 900 | 931 | 900 | 931 | 900 | 931 | 900 | 931 |
| hBglobin | 932 | 1278 | 932 | 1278 | 932 | 1278 | 932 | 1278 |
| intron2 | | | | | | | | |
| hBglobin | 1279 | 1331 | 1279 | 1331 | 1279 | 1331 | 1279 | 1331 |
| exon 3 | | | | | | | | |
| 5′ UTR | — | — | — | — | — | — | 1347 | 3310 |
| hAADC | 1356 | 2804 | 1356 | 2804 | — | — | 1422 | 2864 |
| hAADC codop | — | — | — | — | 1356 | 2798 | — | — |
| 3′ UTR | — | — | — | — | — | — | 2865 | 3310 |
| hGH poly(A) | 2823 | 3299 | 2823 | 3299 | 2817 | 3293 | 3329 | 3805 |
| signal | | | | | | | | |
| 3′ ITR | 3357 | 3497 | 3357 | 3497 | 3351 | 3491 | 3863 | 4003 |

TABLE 6
Component modules or sequence
regions of AADC polynucleotides

| | hAADC_5k | | hAADC_6k | | hAADC_9k | |
|---|---|---|---|---|---|---|
| | Start | Stop | Start | Stop | Start | Stop |
| 5′ ITR | 1 | 145 | 1 | 141 | 1 | 130 |
| CMV Enhancer | 249 | 552 | 245 | 548 | 234 | 537 |
| CMV Promoter | 553 | 755 | 549 | 751 | 538 | 740 |
| ie1 exon 1 | 770 | 903 | 766 | 899 | 755 | 888 |
| ie1 intron1 | 904 | 935 | 900 | 931 | 889 | 920 |
| hBglobin | 936 | 1282 | 932 | 1278 | 921 | 1267 |
| intron2 | | | | | | |
| hBglobin | 1283 | 1335 | 1279 | 1331 | 1268 | 1320 |
| exon 3 | | | | | | |
| 5′ UTR | — | — | — | — | — | — |
| hAADC | | | 1356 | 2798 | 1345 | 2793 |
| hAADC codop | 1360 | 2802 | — | — | — | — |
| 3′ UTR | — | — | 2799 | 3203 | — | — |
| hGH poly(A) | 2821 | 3297 | 3222 | 3698 | 2812 | 3288 |
| signal | | | | | | |
| 3′ ITR | 3355 | 3499 | 3756 | 3896 | 3346 | 3475 |

### Example 4. AADCD Patient Identification

[0464] The present disclosure is directed to the treatment, prophylaxis, palliation and/or amelioration of AADCD and related genetic inborn errors of metabolism in an affected pediatric population. Because AADCD presents in infancy and very early childhood, the presently described method employing AAV-mediated gene therapy is particularly useful. Firstly, the BBB may not yet be fully “closed” in the young brain, and secondly, neonates and infants are likely to be seronegative for AAV antigens and/or neutralizing antibodies that would otherwise impede transduction and successful gene therapy.

[0465] For the studies described herein, a population of AADC-deficient subjects is identified. In some embodiments, the AADC-deficient subjects are rodent models for AADCD. In some embodiments, the AADC-deficient subjects are non-human primates. In some embodiments a population of AADC-deficient human pediatric patients is identified.

[0466] The diagnosis of AADCD is made through detailed clinical assessment, analysis of cerebrospinal fluid neurotransmitters, and further supportive diagnostic investigations. In AADCD, the CSF neurotransmitter profile and other observations include: Low HVA, 5-HIAA, 3-methoxy-4-hydroxyphenylglycol with raised 5-HTP, L-DOPA, and 3-ortho-methyldopa; AADC enzyme activity in plasma is very low or absent; urinary catecholamines raised (vanillactic acid, 3-orthomethyldopa) (Ng, et al., 2014, Pediatr. Drugs (2014) 16:275-291).

[0467] By way of non-limiting example, appropriate subjects for this study are male and female subjects (age range, 3 months to twelve years of age). Before the gene transfer, all of the patients are likely bedridden, and none have head control or are able to talk; they experience oculogyric crises every 2 to 3 days, and these attacks last for hours and consist of eye deviations, dystonia, irritability, hypersalivation, and biting of the tongue and lips; the patients cry in response to minimal stimulation and may display excessive sweating and unstable body temperature; additionally, they choke and regurgitate during feeding and are all underweight, if not emaciated. AADC gene mutations are identified in all patients. Several subjects bear the common IVS6+4A>T mutation, and others, the c. 1297_1298insA mutation. Brain magnetic resonance imaging (MRI) reveal normal brain structures, intact striatum, and normal myelination. The only abnormal finding may be mild cortical atrophy. The lack of structural brain anomalies in these patients is in marked contrast to their severe physical limitations, therefore making them ideal candidates for this new treatment approach. Patients are followed for more than two years after gene transfer (See Brun et al., 2010, Neurology, 75(1):64-71; Hwu, W. L., et al., 2012. Gene therapy for aromatic L-amino acid decarboxylase deficiency. Sci. Transl. Med. Vol. 4, 134ra61).

[0468] For example, a 24-week study is designed to evaluate the safety and tolerability of infusion of the herein disclosed AADC polynucleotide-containing recombinant adeno-associated virus (AAV) vector compositions in human patients diagnosed with AADCD. Patients are evaluated preoperatively and monthly postoperatively for six months, using multiple measures, including the Global Systonia Scale (GDS) (see Comella, et al., 2003, Movement Disorders, 18(3):303-312), motor state diaries, and laboratory tests. Using diaries that separate the day into half-hour segments, the caregivers of the patients will record their mobility during the four days before admission and for another four days at six months after admission to the study site. The patient caregivers are trained to rate subject's condition as sleeping, immobile, mobile without troublesome dyskinesias, or mobile with troublesome dyskinesias. The total number of hours spent in each of these categories is calculated, and the differences between the baseline and the six-month scores are compared between the groups. The short-duration response to levodopa is evaluated at baseline and 6 months after gene transfer; subjects take 100 mg of levodopa orally with 25 mg benserazide after 20 hours without dopaminergic medication. Motor symptoms based on GDS and plasma levodopa concentrations are assessed at baseline and 30 minutes, 1, 2, 3, and 4 hours after levodopa intake (See, for example, Muramatsu, et al., 2010, “A phase I study of aromatic L-amino acid decarboxylase gene therapy for Parkinson's disease.” Mol. Ther. 18:1731-1735).

### Example 5. Administration of AADC Polynucleotide Compositions to Patients for Gene Therapy

[0469] AADC polynucleotide-containing recombinant AAV vector compositions are infused into the substantia nigra, and in particular, the substantia nigra pars compacta (SNpc) and ventral tegmental area (VTA) of patients having AADCD and identified as qualified for treatment according to the parameters set forth in Example 4.

[0470] One method of administration contemplated for use in the methods described herein is real-time convection-enhanced delivery (RCD) of AADC polynucleotide-containing AAV vector compositions by co-infusion of gadoteridol (a magnetic resonance (MR) contrast agent) and T1 or T2 magnetic resonance imaging (MRI), which can predict areas of subsequent AADC gene expression. As described in Richardson, et al., 2011, the accuracy of cannula placement and initial infusate distribution may be safely determined by saline infusion without significantly altering the subsequent distribution of the tracer agent (Richardson, et al., 2011, Neurosurgery, 69(1): 154-163). T2 RCD provides detection of intraparenchymal convection-enhanced delivery in the uninjured brain and may predict subsequent distribution of a transgene after viral vector infusion. Subjects undergo saline infusion/T2 acquisition, immediately followed by gadoteridol infusion/T1 acquisition in the putamen and brainstem. Distribution volumes and spatial patterns are analyzed. Gadoteridol and AAV-encoded AADC are co-infused under alternating T2/T1 acquisition in the thalamus, and hyperintense areas are compared with areas of subsequent transgene expression. Ratios of distribution volume to infusion volume are expected to be similar between saline and gadoteridol RCD. Spatial overlap should correlate well between T2 and T1 images. The second infusate will follow a spatiotemporal pattern similar to that of the first, filling the target area before developing extra-target distribution. Areas of AADC expression should correlate well with areas of both T1 and T2 hyperintensity observed during RCD (Richardson, et al., 2011, Neurosurgery, 69(1):154-163).

[0471] Convection-enhanced delivery (CED) of macromolecules directly into the brain parenchyma has been known for over two decades. CED is a term that denotes the use of a pressure gradient to generate bulk flow within the brain parenchyma, i.e. convection of macromolecules within the interstitial fluid driven by infusing a solution through a cannula placed directly in the targeted structure. This method allows therapeutic agents to be homogenously distributed through large volumes of brain tissue by bypassing the blood brain barrier and surpassing simple diffusion (Richardson, et al., 2011, Stereotact. Funct. Neurosurg. 89:141-151).

[0472] Salegio, et al. recently demonstrated the distribution of nanoparticles of different sizes, including micelles (˜15 nm in size), AAV (˜20-25 nm) and liposomes (˜65 nm), within the CNS of rodents and NHPs (Salegio et al., 2014, Frontiers in Neuroanatomy, vol. 8, article 9: pp. 1-8). Simple injections cannot engage the perivascular system, and specialized infusion cannulae are required, enabling constant pressures to be exerted at the tip of the cannula such that the interstitial hydrostatic pressure is exceeded and infusate can flow out into the tissue. Simple needles generate significant reflux; thus, reflux-resistant cannulas have been developed to counter this tendency. The advent of platforms for MRI-guided convection-enhanced infusions further refined understanding of the mechanics of perivascular flow, and it was demonstrated that perivascular distribution of liposomes was linear with respect to time, the slope of the curve was increased in myelinated regions, and cessation of infusion prevented further expansion in the volume of distribution. (Richardson, et al., 2011, Stereotact. Funct. Neurosurg. 89:141-151; Salegio et al., 2014, Frontiers in Neuroanatomy, vol. 8, article 9: pp. 1-8).

[0473] Intraparenchymal rAAV injections are known to result in robust but relatively local transduction. Such local delivery methods are advantageous when attempting gene therapy for neurological disorders that result from neuropathology that is localized to a specific anatomical region or anatomical circuitry such as in the case of Parkinson's disease. However, in treatments requiring more widespread CNS transduction, intraparenchymal injections are impractical. Treatment of neurological disorders attributable to inborn errors of metabolism and/or single-gene defects, or those that affect motor neurons of the spinal cord can require transduction of large proportions of the brain or spinal cord, respectively. Development of less invasive trans-BBB delivery methods for vectors is an extremely important endeavor. Numerous attempts to use molecules that are known to interact with various active transport mechanisms (probably receptor-mediated) to convey proteins across the BBB have been reported with varying results. Given the large number of AAV serotypes available, one or more serotypes may bind a cell-entry receptor capable of transporting the AAV capsid across the BBB (Manfredsson, et al., 2009, “AAV9: a potential blood-brain barrier buster.” Molecular Therapy 17(3):403-405).

### Vector and Stereotaxic Infusion

[0474] A stereotactic approach may be used to surgically deliver the AAV-AADC vector. Although individuals with AADC deficiency lack epinephrine and norepinephrine, these patients should maintain stable blood pressure and heart rates during the surgery. There should be no notable intracerebral hemorrhages in the postoperative computed tomography (CT) or MRI scans. The needle tracts, as shown on the MRI scans, should show accurate injection into the substantia nigra pars compacta (SNpc) and ventral tegmental area (VTA). The patients will be discharged from the hospital about one week after the surgery (Hwu, W. L., et al., 2012. Gene therapy for aromatic L-amino acid decarboxylase deficiency. Sci. Transl. Med. Vol. 4, 134ra61).

[0475] Subjects of treatment receive the AAV-vector composition vector, safely delivered to substantia nigra pars compacta (SNpc) and ventral tegmental area (VTA) via bilateral infusions, or alternatively, intrastriatally (into the caudate nucleus and putamen), or into the subthalamic nucleus (STN), for example optionally using the FDA-approved SmartFlow neuroventricular cannula (SurgiVision, Inc.) specifically designed for clinical application, with or without the aid of the ClearPoint system to help treating neurosurgeon(s) target and observe the delivery of the therapeutic agent in the brain (See, for example, San Sebastian, et al., 2014, Mol. Ther. Methods Clin. Dev. 3: 14049; See, for example, Feng and Maguire-Zeiss, 2010, CNS Drugs 24(3):177-192).

[0476] For example, during the surgery, two target points are determined in the substantia nigra pars compacta (SNpc) and ventral tegmental area (VTA) that are sufficiently separated from each other in dorsolateral directions and identified on a magnetic resonance image. One burr hole is trepanned in each side of the cranial bone, through which the vector is injected into the two target points via the two-track insertion route. The AAV-vector-containing solution is prepared to a concentration of 1.5×10¹² vector genome/ml, and 50 l per point of the solution is injected at 1 al/min; each patient receives 3×10¹¹ vector genome the AAV-vector construct.

[0477] Neutralizing antibody titers against AAV2 are determined by measuring 3-galactosidase activities in HEK293 cells transduced with 5×10³ vector genome/cell of AAV2 vectors expressing β-galactosidase in various dilutions of sera.

### PET

[0478] The AADC expression level in the substantia nigra are assessed on PET imaging with FMT six days before surgery and at one- and six-months after gene transfer. All patients cease taking dopaminergic medications 18 hours before PET and take 2.5 mg/kg of carbidopa orally one hour before FMT injection. Subsequently, 0.12 mCi/kg of FMT in saline is infused into an antecubital vein, and a 90-minute dynamic acquisition sequence is obtained. The PET and magnetic resonance imaging data are co-registered with a fusion processing program (Syntegra; Philips, Amsterdam, The Netherlands) to produce the fusion images. Radioactivities within volumes of interest drawn in the nigrostriatal pathway are calculated between 80 and 90 minutes after tracer injection. A change in nigrostriatal pathway FMT uptake from baseline to 24 weeks is assessed using the substantia nigra to striatal ratio of radioactivities.

### Statistical Analysis

[0479] Values at baseline and 6 months after gene transfer are compared using Student's t-test (paired analyses). A two-sided P value <0.05 is taken to indicate significant differences. Two-way analysis of variance with Bonferroni correction of P values is used for the short-duration response to levodopa. (See, for example, Muramatsu, et al., 2010, “A phase I study of aromatic L-amino acid decarboxylase gene therapy for Parkinson's disease.” Mol. Ther. 18:1731-1735).

[0480] Safety and tolerability of bilateral administration of AAV-vector compositions using real-time image-guided infusion into the brains of AADCD subjects may be monitored for up to or after 9 months post-surgery. Broad coverage of targeted areas (substantia nigra pars compacta (SNpc) and ventral tegmental area (VTA) and widespread AADC protein distribution in the striatum should be achieved without inducing any adverse effects.

### Changes in Growth and Motor Skills.

[0481] The patients should gain weight and exhibit improvement in their motor scores after gene transfer, within a year, post-treatment. Weight will be measured at 3 to 6 months after gene transfer. All patients initially should have raw scores of zero on the Alberta Infant Motor Scale (AIMS) and very low raw scores for the Peabody Developmental Motor Scale, Second Edition (PDMS-II). After the gene transfer, all of the patients should show continuous increases in their raw scores on these two scales, which indicates that their motor functions have improved. The Comprehensive Developmental Inventory for Infants and Toddlers (CDIIT) covers both cognition and motor development. All of the patients should show low raw CDIIT scores before gene transfer, and the subsequent increase in scores demonstrate improvement in both motor and cognitive functions.

Subjective Improvements after Gene Transfer

[0482] To document the symptoms that are more difficult to quantify, parents of the patients are asked to fill out a questionnaire at the end of the study. The symptoms of the oculogyric crises should lessen, and eye deviations and sleep disruptions, for example, are some mild symptoms of the oculogyric crises that may remain after gene therapy. Subjects may experience increased emotional stability, and/or some improvements in sweating and hyperthermia (a common manifestation of body temperature instability in hot weather). There should be no detectable abnormality in heart rate variability as assessed by 24-hour Holter monitoring either before or after gene transfer. Before gene therapy, patients that were bedridden and showed little spontaneous movement may exhibit less severe ptosis (drooping of the upper eyelid) one to two weeks after the gene transfer. According to previous studies, dyskinesia may occur one month after gene transfer, but upon observation of a decrease in dyskinesia, motor development should start (Hwu, W. L., et al., 2012. Gene therapy for aromatic L-amino acid decarboxylase deficiency. Sci. Transl. Med. Vol. 4, 134ra61). Subjects may exhibit increased head control after three months, sitting with support after six to nine months, sitting up from the prone position after thirteen months, and holding toys and standing with support sixteen months after the gene transfer, for example. Anti-AAV2 antibodies should be negative in the patients before gene therapy, and the titers may increase slightly after gene transfer.

PET scans and CSF analyses

[0483] PET scans and CSF analyses are completed for the treated patients. Six months after gene transfer, PET scans should reveal that uptake of 6-[18F] fluorodopa (FDOPA) increase from baseline in the combined (right and left) treatment sites. The CSF analysis should reveal increases in the levels of homovanillic acid (HVA, a metabolite of dopamine) and 5-hydroxyindoleacetic acid (HIAA, a metabolite of serotonin). However, the levels of L-DOPA and 3-O-methyldopa may remain elevated (Hwu, W. L., et al., 2012. Gene therapy for aromatic L-amino acid decarboxylase deficiency. Sci. Transl. Med. Vol. 4, 134ra61).

### Example 6. Administration of AADC Polynucleotides

[0484] AADC polynucleotide-containing recombinant AAV vector compositions are infused into the putamen of patients having AADCD and identified as qualified for treatment according to the parameters set forth in Example 4 using the administration methods described in Example 5. The dose, number of patients and volume are outlined in Table 7.

TABLE 7
Study Design

| | Number of | | | |
|---|---|---|---|---|
| Study No. | Patients | Dose | Volume | |
| 1 | 6 | 3 × 10¹¹ vg | 100 | ul per putamen |
| 2 | 6 | 9 × 10¹¹ vg | 300 | ul per putamen |
| 3 | 10 | 2.3 × 10¹¹ vg | 100 | ul per putamen |
| 4 | 10 | 7.5 × 10¹¹ vg | 100 | ul per putamen |
| 5 | 5 | 7.5 × 10¹¹ vg | 450 | ul per putamen |
| 6 | Up to 20 | 1.4 × 10¹² vg | Up to 900 | ul per putamen |
| 7 | Up to 20 | 4.8 × 10¹² vg | Up to 900 | ul per putamen |
| 8 | Up to 20 | 8.8 × 10¹² vg | Up to 900 | ul per putamen |

[0485] During the course of the study the safety and tolerability of the infusion of the AADC polynucleotide-containing recombinant adeno-associated virus (AAV) vector compositions in human patients diagnosed with AADCD is evaluated. Patients are evaluated preoperatively and monthly postoperatively for six months, using multiple measures, including the Global Systonia Scale (GDS) (see Comella, et al., 2003, Movement Disorders, 18(3):303-312), L-DOPA challenge test, UPDRS scores, motor state diaries, and laboratory tests. Using diaries that separate the day into half-hour segments, the caregivers of the patients will record their mobility during the four days before admission and for another four days at six months after admission to the study site. The patient caregivers are trained to rate subject's condition as sleeping, immobile, mobile without troublesome dyskinesias, or mobile with troublesome dyskinesias. The total number of hours spent in each of these categories is calculated, and the differences between the baseline and the six-month scores are compared between the groups. The short-duration response to levodopa is evaluated at baseline and 6 months after gene transfer; subjects take 100 mg of levodopa orally with 25 mg benserazide after 20 hours without dopaminergic medication. Motor symptoms based on GDS and plasma levodopa concentrations are assessed at baseline and 30 minutes, 1, 2, 3, and 4 hours after levodopa intake (See, for example, Muramatsu, et al., 2010, “A phase I study of aromatic L-amino acid decarboxylase gene therapy for Parkinson's disease.” Mol. Ther. 18:1731-1735).

### Example 7. In Vivo Administration of AADC Polynucleotides

[0486] Two AADC polynucleotide-containing recombinant AAV vector compositions (SEQ ID NO: 17 and 19), a control and a standard were administered to rats (n=5) by bilateral intrastriation (10 ul/side) at a dose level of 2×10¹² vg/ml. The expression of AADC in rat striatum was determined by ELISA after 4 and 8 weeks. Variation was seen between the animals and the hemispheres due to variable delivery between the infusion sites. Both SEQ ID NO: 10 and 12 expressed AADC, but SEQ ID NO: 12 showed up to 200% increase of expression as compared to the standard construct.

### Example 8. Dose Response Study of AADC Polynucleotides

[0487] Compositions of AADC polynucleotide-containing recombinant AAV vectors (SEQ ID NO: 17) at five different dose levels ranging from 1×10¹¹ vg/ml to 1×10¹³ vg/ml and a control are administered to 6-OHDA lesioned rats. The behavioral response to low-dose levodopa administration is quantified before and after (week 3 and 4) delivery of the composition. 5 weeks after dosing, necropsy is conducted and the AADC enzymatic activity is measured in ex vivo striatal tissue assay and the distribution of AADC in the brain is determined by immunohistochemical (IHC) staining.

### Example 9. Effect of Empty Particles on Intrastriatal Transduction

[0488] Adult rats (n=6) were administered varying ratios of full:empty vector particles at: 0% full, 50% full, 85% full or 99% full. AADC polynucleotide-containing recombinant AAV vector (SEQ ID NO: 10) at a constant dose and volume (5 ul and 1×10 vg) was administered intrastriatally. The rats were evaluated 4 weeks after administration. The low vector dose resulted in limited AADC vector expression. The volume of distribution for the particles is shown in Table 8 (ELISA) and the striatal levels of AADC expression is shown in Table 9 (Histology).

TABLE 8
Volume of Distribution

| % Ratio of full AAV2-AADC | Approximate Volume of Distribution |
|---|---|
| particle to empty capsids | (mm³) |
| 50:50 | 2 |
| 70:30 | 2.4 |
| 85:15 | 2.5 |
| 100:0 | 3 |

TABLE 9
Striatal Levels

| % full of AAV2-AADC particles | AADC pg/ug protein |
|---|---|
| 0 | 0.4 |
| 52 | 1.1 |
| 58 | 1.7 |
| 83 | 2 |
| >99 | 2.1 |

[0489] Distribution was comparable for all groups. Relatively low vector dose resulted in limited AADC expression. There was also a trend to lower AADC expression levels with >30% empty particles.

[0490] While the present invention has been described at some length and with some particularity with respect to the several described embodiments, it is not intended that it should be limited to any such particulars or embodiments or any particular embodiment, but it is to be construed with references to the appended claims so as to provide the broadest possible interpretation of such claims in view of the prior art and, therefore, to effectively encompass the intended scope of the invention.

[0491] All publications, patent applications, patents, and other references mentioned herein are incorporated by reference in their entirety. In case of conflict, the present specification, including definitions, will control. In addition, section headings, the materials, methods, and examples are illustrative only and not intended to be limiting.

We claim:

1. A method of treating AADC deficiency or a related childhood monoamine neurotransmitter disorder by administering a composition comprising at least one AAV particle to a substantia nigra pars compacta of a subject in need of treatment or amelioration of said disorder, wherein said at least one AAV particle comprises an AADC polynucleotide selected from the group consisting of SEQ ID NOs 2-24 or variants having at least 95% identity thereto.

2. The method of claim 1, wherein the AADC polynucleotide has at least 95% identity to any of the sequences selected from SEQ ID NOs 2-24.

3. The method of claim 1, wherein the AADC polynucleotide has at least 99% identity to any of the sequences selected from SEQ ID NOs 2-24.

4. The method of claim 1, wherein the AAV particle comprises a capsid serotype selected from the group consisting of AAV1, AAV2, AAV2G9, AAV3, AAV3a, AAV3b, AAV3-3, AAV4, AAV4-4, AAV5, AAV6, AAV6.1, AAV6.2, AAV6.1.2, AAV7, AAV7.2, AAV8, AAV9, AAV9.11, AAV9.13, AAV9.16, AAV9.24, AAV9.45, AAV9.47, AAV9.61, AAV9.68, AAV9.84, AAV9.9, AAV10, AAV11, AAV12, AAV16.3, AAV24.1, AAV27.3, AAV42.12, AAV42-1b, AAV42-2, AAV42-3a, AAV42-3b, AAV42-4, AAV42-5a, AAV42-5b, AAV42-6b, AAV42-8, AAV42-10, AAV42-11, AAV42-12, AAV42-13, AAV42-15, AAV42-aa, AAV43-1, AAV43-12, AAV43-20, AAV43-21, AAV43-23, AAV43-25, AAV43-5, AAV44.1, AAV44.2, AAV44.5, AAV223.1, AAV223.2, AAV223.4, AAV223.5, AAV223.6, AAV223.7, AAV1-7/rh.48, AAV1-8/rh.49, AAV2-15/rh.62, AAV2-3/rh.61, AAV2-4/rh.50, AAV2-5/rh.51, AAV3.1/hu.6, AAV3.1/hu.9, AAV3-9/rh.52, AAV3-11/rh.53, AAV4-8/rl 1.64, AAV4-9/rh.54, AAV4-19/rh.55, AAV5-3/rh.57, AAV5-22/rh.58, AAV7.3/hu.7, AAV16.8/hu.10, AAV16.12/hu.11, AAV29.3/bb.1, AAV29.5/bb.2, AAV106.1/hu.37, AAV114.3/hu.40, AAV127.2/hu.41, AAV127.5/hu.42, AAV128.3/hu.44, AAV130.4/hu.48, AAV145.1/hu.53, AAV145.5/hu.54, AAV145.6/hu.55, AAV161.10/hu.60, AAV161.6/hu.61, AAV33.12/hu.17, AAV33.4/hu.15, AAV33.8/hu.16, AAV52/hu.19, AAV52.1/hu.20, AAV58.2/hu.25, AAVA3.3, AAVA3.4, AAVA3.5, AAVA3.7, AAVC1, AAVC2, AAVC5, AAV-DJ, AAV-DJ8, AAVF3, AAVF5, AAVH2, AAVrh.72, AAVhu.8, AAVrh.68, AAVrh.70, AAVpi.1, AAVpi.3, AAVpi.2, AAVrh.60, AAVrh.44, AAVrh.65, AAVrh.55, AAVrh.47, AAVrh.69, AAVrh.45, AAVrh.59, AAVhu.12, AAVH6, AAVLK03, AAVH-1/hu.1, AAVH-5/hu.3, AAVLG-10/rh.40, AAVLG-4/rh.38, AAVLG-9/hu.39, AAVN721-8/rh.43, AAVCh.5, AAVCh.5R1, AAVcy.2, AAVcy.3, AAVcy.4, AAVcy.5, AAVCy.5R1, AAVCy.5R2, AAVCy.5R3, AAVCy.5R4, AAVcy.6, AAVhu.1, AAVhu.2, AAVhu.3, AAVhu.4, AAVhu.5, AAVhu.6, AAVhu.7, AAVhu.9, AAVhu.10, AAVhu.11, AAVhu.13, AAVhu.15, AAVhu.16, AAVhu.17, AAVhu.18, AAVhu.20, AAVhu.21, AAVhu.22, AAVhu.23.2, AAVhu.24, AAVhu.25, AAVhu.27, AAVhu.28, AAVhu.29, AAVhu.29R, AAVhu.31, AAVhu.32, AAVhu.34, AAVhu.35, AAVhu.37, AAVhu.39, AAVhu.40, AAVhu.41, AAVhu.42, AAVhu.43, AAVhu.44, AAVhu.44R1, AAVhu.44R2, AAVhu.44R3, AAVhu.45, AAVhu.46, AAVhu.47, AAVhu.48, AAVhu.48R1, AAVhu.48R2, AAVhu.48R3, AAVhu.49, AAVhu.51, AAVhu.52, AAVhu.54, AAVhu.55, AAVhu.56, AAVhu.57, AAVhu.58, AAVhu.60, AAVhu.61, AAVhu.63, AAVhu.64, AAVhu.66, AAVhu.67, AAVhu.14/9, AAVhu.t 19, AAVrh.2, AAVrh.2R, AAVrh.8, AAVrh.8R, AAVrh.10, AAVrh.12, AAVrh.13, AAVrh.13R, AAVrh.14, AAVrh.17, AAVrh.18, AAVrh.19, AAVrh.20, AAVrh.21, AAVrh.22, AAVrh.23, AAVrh.24, AAVrh.25, AAVrh.31, AAVrh.32, AAVrh.33, AAVrh.34, AAVrh.35, AAVrh.36, AAVrh.37, AAVrh.37R2, AAVrh.38, AAVrh.39, AAVrh.40, AAVrh.46, AAVrh.48, AAVrh.48.1, AAVrh.48.1.2, AAVrh.48.2, AAVrh.49, AAVrh.51, AAVrh.52, AAVrh.53, AAVrh.54, AAVrh.56, AAVrh.57, AAVrh.58, AAVrh.61, AAVrh.64, AAVrh.64R1, AAVrh.64R2, AAVrh.67, AAVrh.73, AAVrh.74, AAVrh8R, AAVrh8R A586R mutant, AAVrh8R R533A mutant, AAAV, BAAV, caprine AAV, bovine AAV, AAVhE1.1, AAVhEr1.5, AAVhER1.14, AAVhEr1.8, AAVhEr1.16, AAVhEr1.18, AAVhEr1.35, AAVhEr1.7, AAVhEr1.36, AAVhEr2.29, AAVhEr2.4, AAVhEr2.16, AAVhEr2.30, AAVhEr2.31, AAVhEr2.36, AAVhER1.23, AAVhEr3.1, AAV2.5T, AAV-PAEC, AAV-LK01, AAV-LK02, AAV-LK03, AAV-LK04, AAV-LK05, AAV-LK06, AAV-LK07, AAV-LK08, AAV-LK09, AAV-LK10, AAV-LK11, AAV-LK12, AAV-LK13, AAV-LK14, AAV-LK15, AAV-LK16, AAV-LK17, AAV-LK18, AAV-LK19, AAV-PAEC2, AAV-PAEC4, AAV-PAEC6, AAV-PAEC7, AAV-PAEC8, AAV-PAEC11, AAV-PAEC12, AAV-2-pre-miRNA-101, AAV-8h, AAV-8b, AAV-h, AAV-b, AAV SM 10-2, AAV Shuffle 100-1, AAV Shuffle 100-3, AAV Shuffle 100-7, AAV Shuffle 10-2, AAV Shuffle 10-6, AAV Shuffle 10-8, AAV Shuffle 100-2, AAV SM 10-1, AAV SM 10-8, AAV SM 100-3, AAV SM 100-10, BNP61 AAV, BNP62 AAV, BNP63 AAV, AAVrh.50, AAVrh.43, AAVrh.62, AAVrh.48, AAVhu.19, AAVhu.11, AAVhu.53, AAV4-8/rh.64, AAVLG-9/hu.39, AAV54.5/hu.23, AAV54.2/hu.22, AAV54.7/hu.24, AAV54.1/hu.21, AAV54.4R/hu.27, AAV46.2/hu.28, AAV46.6/hu.29, AAV128.1/hu.43, true type AAV (ttAAV), UPENN AAV 10, Japanese AAV 10, AAV CBr-7.1, AAV CBr-7.10, AAV CBr-7.2, AAV CBr-7.3, AAV CBr-7.4, AAV CBr-7.5, AAV CBr-7.7, AAV CBr-7.8, AAV CBr-B7.3, AAV CBr-B7.4, AAV CBr-E1, AAV CBr-E2, AAV CBr-E3, AAV CBr-E4, AAV CBr-E5, AAV CBr-e5, AAV CBr-E6, AAV CBr-E7, AAV CBr-E8, AAV CHt-1, AAV CHt-2, AAV CHt-3, AAV CHt-6.1, AAV CHt-6.10, AAV CHt-6.5, AAV CHt-6.6, AAV CHt-6.7, AAV CHt-6.8, AAV CHt-P1, AAV CHt-P2, AAV CHt-P5, AAV CHt-P6, AAV CHt-P8, AAV CHt-P9, AAV CKd-1, AAV CKd-10, AAV CKd-2, AAV CKd-3, AAV CKd-4, AAV CKd-6, AAV CKd-7, AAV CKd-8, AAV CKd-B1, AAV CKd-B2, AAV CKd-B3, AAV CKd-B4, AAV CKd-B5, AAV CKd-B6, AAV CKd-B7, AAV CKd-B8, AAV CKd-H1, AAV CKd-H2, AAV CKd-H3, AAV CKd-H4, AAV CKd-H5, AAV CKd-H6, AAV CKd-N3, AAV CKd-N4, AAV CKd-N9, AAV CLg-F1, AAV CLg-F2, AAV CLg-F3, AAV CLg-F4, AAV CLg-F5, AAV CLg-F6, AAV CLg-F7, AAV CLg-F8, AAV CLv-1, AAV CLv1-1, AAV Clv1-10, AAV CLv1-2, AAV CLv-12, AAV CLv1-3, AAV CLv-13, AAV CLv1-4, AAV Clv1-7, AAV Clv1-8, AAV Clv1-9, AAV CLv-2, AAV CLv-3, AAV CLv-4, AAV CLv-6, AAV CLv-8, AAV CLv-D1, AAV CLv-D2, AAV CLv-D3, AAV CLv-D4, AAV CLv-D5, AAV CLv-D6, AAV CLv-D7, AAV CLv-D8, AAV CLv-E1, AAV CLv-K1, AAV CLv-K3, AAV CLv-K6, AAV CLv-L4, AAV CLv-L5, AAV CLv-L6, AAV CLv-M1, AAV CLv-M11, AAV CLv-M2, AAV CLv-M5, AAV CLv-M6, AAV CLv-M7, AAV CLv-M8, AAV CLv-M9, AAV CLv-R1, AAV CLv-R2, AAV CLv-R3, AAV CLv-R4, AAV CLv-R5, AAV CLv-R6, AAV CLv-R7, AAV CLv-R8, AAV CLv-R9, AAV CSp-1, AAV CSp-10, AAV CSp-11, AAV CSp-2, AAV CSp-3, AAV CSp-4, AAV CSp-6, AAV CSp-7, AAV CSp-8, AAV CSp-8.10, AAV CSp-8.2, AAV CSp-8.4, AAV CSp-8.5, AAV CSp-8.6, AAV CSp-8.7, AAV CSp-8.8, AAV CSp-8.9, AAV CSp-9, AAV.hu.48R3, AAV.VR-355, AAV3B, AAV4, AAV5, AAVF1/HSC1, AAVF11/HSC11, AAVF12/HSC12, AAVF13/HSC13, AAVF14/HSC14, AAVF15/HSC15, AAVF16/HSC16, AAVF17/HSC17, AAVF2/HSC2, AAVF3/HSC3, AAVF4/HSC4, AAVF5/HSC5, AAVF6/HSC6, AAVF7/HSC7, AAVF8/HSC8, and/or AAVF9/HSC9.

5. The method of claim 4, wherein the capsid serotype is selected from the group consisting of AAV6, AAVrh10, AAV9 (hu14), AAV-DJ and AAV9.47.

6. The method of claim 1, wherein the AAV particle comprising an AADC polynucleotide further comprises a promoter region, 5′ UTR, 3′ UTR and a poly(A) signal.

7. The method of claim 6, wherein the AADC polynucleotide further comprising at least one 5′ ITR and one 3′ ITR.

8. The method of claim 7, wherein one or more of the 5′ ITRs are located at the 5′ end of the promoter region and one or more of the 3′ ITRs are located at the 3′ end of the poly(A) signal.

9. The method of claim 7, wherein the promoter region comprises an enhancer element, a promoter element, a first exon region, a first intron region, a second intron region and a second exon region.

10. The method of claim 9, wherein the enhancer element and the promoter element are derived from CMV.

11. The method of claim 10, wherein the first exon region is ie1 exon 1 or fragments thereof, the first intron region is ie1 intron 1 or fragments thereof, the second intron region is hBglobin intron 2 or fragments thereof and the second exon region is hBglobin exon 3 or fragments thereof.

12. The method of claim 6, wherein the poly(A) signal is derived from human growth hormone.

13. The method of claim 1, wherein the subject is a human between 2 and 8 years old.

14. The method of claim 1, wherein the ratio of AAV particles comprising the AADC polynucleotide and AAV particles without the AADC polynucleotide in the composition is at least 70:30.

15. The method of claim 14, wherein the ratio of AAV viral particles comprising the AADC polynucleotide to AAV viral particles without the AADC polynucleotide in the composition is at least 85:15.

16. The method of claim 14, wherein the ratio of AAV viral particles comprising the AADC polynucleotide to AAV viral particles without the AADC polynucleotide in the composition is at least 100:0.

17. The method of claim 1, wherein the subject uses a compression device during the contacting of the subject with the composition and wherein the compression device reduces the chances of deep vein thrombosis in the subject.

18. A method of treating AADC deficiency or a related childhood monoamine neurotransmitter disorder by administering a composition comprising at least one AAV particle to a putamen of a subject in need of treatment or amelioration of said disorder, wherein said at least one AAV particle comprises an AADC polynucleotide selected from the group consisting of SEQ ID NOs 2-24 or variants having at least 95% identity thereto.

19. The method of claim 18, wherein the ratio of AAV particles comprising the AADC polynucleotide and AAV particles without the AADC polynucleotide in the composition is at least 70:30.

20. The method of claim 19, wherein the ratio of AAV viral particles comprising the AADC polynucleotide to AAV viral particles without the AADC polynucleotide in the composition is at least 85:15.

21. The method of claim 19, wherein the ratio of AAV viral particles comprising the AADC polynucleotide to AAV viral particles without the AADC polynucleotide in the composition is at least 100:0.

22. The method of claim 18, wherein the subject uses a compression device during the contacting of the subject with the composition and wherein the compression device reduces the chances of deep vein thrombosis in the subject.

23. The method of claim 18, wherein the at least one AAV particle comprises a capsid serotype selected from the group consisting of AAV1, AAV2, AAV2G9, AAV3, AAV3a, AAV3b, AAV3-3, AAV4, AAV4-4, AAV5, AAV6, AAV6.1, AAV6.2, AAV6.1.2, AAV7, AAV7.2, AAV8, AAV9, AAV9.11, AAV9.13, AAV9.16, AAV9.24, AAV9.45, AAV9.47, AAV9.61, AAV9.68, AAV9.84, AAV9.9, AAV10, AAV11, AAV12, AAV16.3, AAV24.1, AAV27.3, AAV42.12, AAV42-1b, AAV42-2, AAV42-3a, AAV42-3b, AAV42-4, AAV42-5a, AAV42-5b, AAV42-6b, AAV42-8, AAV42-10, AAV42-11, AAV42-12, AAV42-13, AAV42-15, AAV42-aa, AAV43-1, AAV43-12, AAV43-20, AAV43-21, AAV43-23, AAV43-25, AAV43-5, AAV44.1, AAV44.2, AAV44.5, AAV223.1, AAV223.2, AAV223.4, AAV223.5, AAV223.6, AAV223.7, AAV1-7/rh.48, AAV1-8/rh.49, AAV2-15/rh.62, AAV2-3/rh.61, AAV2-4/rh.50, AAV2-5/rh.51, AAV3.1/hu.6, AAV3.1/hu.9, AAV3-9/rh.52, AAV3-11/rh.53, AAV4-8/rl 1.64, AAV4-9/rh.54, AAV4-19/rh.55, AAV5-3/rh.57, AAV5-22/rh.58, AAV7.3/hu.7, AAV16.8/hu.10, AAV16.12/hu.11, AAV29.3/bb.1, AAV29.5/bb.2, AAV106.1/hu.37, AAV114.3/hu.40, AAV127.2/hu.41, AAV127.5/hu.42, AAV128.3/hu.44, AAV130.4/hu.48, AAV145.1/hu.53, AAV145.5/hu.54, AAV145.6/hu.55, AAV161.10/hu.60, AAV161.6/hu.61, AAV33.12/hu.17, AAV33.4/hu.15, AAV33.8/hu.16, AAV52/hu.19, AAV52.1/hu.20, AAV58.2/hu.25, AAVA3.3, AAVA3.4, AAVA3.5, AAVA3.7, AAVC1, AAVC2, AAVC5, AAV-DJ, AAV-DJ8, AAVF3, AAVF5, AAVH2, AAVrh.72, AAVhu.8, AAVrh.68, AAVrh.70, AAVpi.1, AAVpi.3, AAVpi.2, AAVrh.60, AAVrh.44, AAVrh.65, AAVrh.55, AAVrh.47, AAVrh.69, AAVrh.45, AAVrh.59, AAVhu.12, AAVH6, AAVLK03, AAVH-1/hu.1, AAVH-5/hu.3, AAVLG-10/rh.40, AAVLG-4/rh.38, AAVLG-9/hu.39, AAVN721-8/rh.43, AAVCh.5, AAVCh.5R1, AAVcy.2, AAVcy.3, AAVcy.4, AAVcy.5, AAVCy.5R1, AAVCy.5R2, AAVCy.5R3, AAVCy.5R4, AAVcy.6, AAVhu.1, AAVhu.2, AAVhu.3, AAVhu.4, AAVhu.5, AAVhu.6, AAVhu.7, AAVhu.9, AAVhu.10, AAVhu.11, AAVhu.13, AAVhu.15, AAVhu.16, AAVhu.17, AAVhu.18, AAVhu.20, AAVhu.21, AAVhu.22, AAVhu.23.2, AAVhu.24, AAVhu.25, AAVhu.27, AAVhu.28, AAVhu.29, AAVhu.29R, AAVhu.31, AAVhu.32, AAVhu.34, AAVhu.35, AAVhu.37, AAVhu.39, AAVhu.40, AAVhu.41, AAVhu.42, AAVhu.43, AAVhu.44, AAVhu.44R1, AAVhu.44R2, AAVhu.44R3, AAVhu.45, AAVhu.46, AAVhu.47, AAVhu.48, AAVhu.48R1, AAVhu.48R2, AAVhu.48R3, AAVhu.49, AAVhu.51, AAVhu.52, AAVhu.54, AAVhu.55, AAVhu.56, AAVhu.57, AAVhu.58, AAVhu.60, AAVhu.61, AAVhu.63, AAVhu.64, AAVhu.66, AAVhu.67, AAVhu.14/9, AAVhu.t 19, AAVrh.2, AAVrh.2R, AAVrh.8, AAVrh.8R, AAVrh.10, AAVrh.12, AAVrh.13, AAVrh.13R, AAVrh.14, AAVrh.17, AAVrh.18, AAVrh.19, AAVrh.20, AAVrh.21, AAVrh.22, AAVrh.23, AAVrh.24, AAVrh.25, AAVrh.31, AAVrh.32, AAVrh.33, AAVrh.34, AAVrh.35, AAVrh.36, AAVrh.37, AAVrh.37R2, AAVrh.38, AAVrh.39, AAVrh.40, AAVrh.46, AAVrh.48, AAVrh.48.1, AAVrh.48.1.2, AAVrh.48.2, AAVrh.49, AAVrh.51, AAVrh.52, AAVrh.53, AAVrh.54, AAVrh.56, AAVrh.57, AAVrh.58, AAVrh.61, AAVrh.64, AAVrh.64R1, AAVrh.64R2, AAVrh.67, AAVrh.73, AAVrh.74, AAVrh8R, AAVrh8R A586R mutant, AAVrh8R R533A mutant, AAAV, BAAV, caprine AAV, bovine AAV, AAVhE1.1, AAVhEr1.5, AAVhER1.14, AAVhEr1.8, AAVhEr1.16, AAVhEr1.18, AAVhEr1.35, AAVhEr1.7, AAVhEr1.36, AAVhEr2.29, AAVhEr2.4, AAVhEr2.16, AAVhEr2.30, AAVhEr2.31, AAVhEr2.36, AAVhER1.23, AAVhEr3.1, AAV2.5T, AAV-PAEC, AAV-LK01, AAV-LK02, AAV-LK03, AAV-LK04, AAV-LK05, AAV-LK06, AAV-LK07, AAV-LK08, AAV-LK09, AAV-LK10, AAV-LK11, AAV-LK12, AAV-LK13, AAV-LK14, AAV-LK15, AAV-LK16, AAV-LK17, AAV-LK18, AAV-LK19, AAV-PAEC2, AAV-PAEC4, AAV-PAEC6, AAV-PAEC7, AAV-PAEC8, AAV-PAEC11, AAV-PAEC12, AAV-2-pre-miRNA-101, AAV-8h, AAV-8b, AAV-h, AAV-b, AAV SM 10-2, AAV Shuffle 100-1, AAV Shuffle 100-3, AAV Shuffle 100-7, AAV Shuffle 10-2, AAV Shuffle 10-6, AAV Shuffle 10-8, AAV Shuffle 100-2, AAV SM 10-1, AAV SM 10-8, AAV SM 100-3, AAV SM 100-10, BNP61 AAV, BNP62 AAV, BNP63 AAV, AAVrh.50, AAVrh.43, AAVrh.62, AAVrh.48, AAVhu.19, AAVhu.11, AAVhu.53, AAV4-8/rh.64, AAVLG-9/hu.39, AAV54.5/hu.23, AAV54.2/hu.22, AAV54.7/hu.24, AAV54.1/hu.21, AAV54.4R/hu.27, AAV46.2/hu.28, AAV46.6/hu.29, AAV128.1/hu.43, true type AAV (ttAAV), UPENN AAV 10, Japanese AAV 10, AAV CBr-7.1, AAV CBr-7.10, AAV CBr-7.2, AAV CBr-7.3, AAV CBr-7.4, AAV CBr-7.5, AAV CBr-7.7, AAV CBr-7.8, AAV CBr-B7.3, AAV CBr-B7.4, AAV CBr-E1, AAV CBr-E2, AAV CBr-E3, AAV CBr-E4, AAV CBr-E5, AAV CBr-e5, AAV CBr-E6, AAV CBr-E7, AAV CBr-E8, AAV CHt-1, AAV CHt-2, AAV CHt-3, AAV CHt-6.1, AAV CHt-6.10, AAV CHt-6.5, AAV CHt-6.6, AAV CHt-6.7, AAV CHt-6.8, AAV CHt-P1, AAV CHt-P2, AAV CHt-P5, AAV CHt-P6, AAV CHt-P8, AAV CHt-P9, AAV CKd-1, AAV CKd-10, AAV CKd-2, AAV CKd-3, AAV CKd-4, AAV CKd-6, AAV CKd-7, AAV CKd-8, AAV CKd-B1, AAV CKd-B2, AAV CKd-B3, AAV CKd-B4, AAV CKd-B5, AAV CKd-B6, AAV CKd-B7, AAV CKd-B8, AAV CKd-H1, AAV CKd-H2, AAV CKd-H3, AAV CKd-H4, AAV CKd-H5, AAV CKd-H6, AAV CKd-N3, AAV CKd-N4, AAV CKd-N9, AAV CLg-F1, AAV CLg-F2, AAV CLg-F3, AAV CLg-F4, AAV CLg-F5, AAV CLg-F6, AAV CLg-F7, AAV CLg-F8, AAV CLv-1, AAV CLv1-1, AAV Clv1-10, AAV CLv1-2, AAV CLv-12, AAV CLv1-3, AAV CLv-13, AAV CLv1-4, AAV Clv1-7, AAV Clv1-8, AAV Clv1-9, AAV CLv-2, AAV CLv-3, AAV CLv-4, AAV CLv-6, AAV CLv-8, AAV CLv-D1, AAV CLv-D2, AAV CLv-D3, AAV CLv-D4, AAV CLv-D5, AAV CLv-D6, AAV CLv-D7, AAV CLv-D8, AAV CLv-E1, AAV CLv-K1, AAV CLv-K3, AAV CLv-K6, AAV CLv-L4, AAV CLv-L5, AAV CLv-L6, AAV CLv-M1, AAV CLv-M11, AAV CLv-M2, AAV CLv-M5, AAV CLv-M6, AAV CLv-M7, AAV CLv-M8, AAV CLv-M9, AAV CLv-R1, AAV CLv-R2, AAV CLv-R3, AAV CLv-R4, AAV CLv-R5, AAV CLv-R6, AAV CLv-R7, AAV CLv-R8, AAV CLv-R9, AAV CSp-1, AAV CSp-10, AAV CSp-11, AAV CSp-2, AAV CSp-3, AAV CSp-4, AAV CSp-6, AAV CSp-7, AAV CSp-8, AAV CSp-8.10, AAV CSp-8.2, AAV CSp-8.4, AAV CSp-8.5, AAV CSp-8.6, AAV CSp-8.7, AAV CSp-8.8, AAV CSp-8.9, AAV CSp-9, AAV.hu.48R3, AAV.VR-355, AAV3B, AAV4, AAV5, AAVF1/HSC1, AAVF11/HSC11, AAVF12/HSC12, AAVF13/HSC13, AAVF14/HSC14, AAVF15/HSC15, AAVF16/HSC16, AAVF17/HSC17, AAVF2/HSC2, AAVF3/HSC3, AAVF4/HSC4, AAVF5/HSC5, AAVF6/HSC6, AAVF7/HSC7, AAVF8/HSC8, and/or AAVF9/HSC9.

24. The method of claim 23, wherein the capsid serotype is selected from the group consisting of AAV6, AAVrh10, AAV9 (hu14), AAV-DJ and AAV9.47.

25. The method of claim 18, wherein the at least one AAV particle comprising an AADC polynucleotide further comprises a promoter region, 5′ UTR, 3′ UTR and a poly(A) signal.

26. The method of claim 25, wherein the AADC polynucleotide further comprising at least one 5′ ITR and one 3′ ITR.

27. The method of claim 26, wherein one or more of the 5′ ITRs are located at the 5′ end of the promoter region and one or more of the 3′ ITRs are located at the 3′ end of the poly(A) signal.

28. The method of claim 26, wherein the promoter region comprises an enhancer element, a promoter element, a first exon region, a first intron region, a second intron region and a second exon region.

29. The method of claim 28, wherein the enhancer element and the promoter element are derived from CMV.

30. The method of claim 29, wherein the first exon region is ie1 exon 1 or fragments thereof, the first intron region is ie1 intron 1 or fragments thereof, the second intron region is hBglobin intron 2 or fragments thereof and the second exon region is hBglobin exon 3 or fragments thereof.

31. The method of claim 25, wherein the poly(A) signal is derived from human growth hormone.

32. A method of improving the sleep-wake cycle of a subject comprising contacting said subject with a composition comprising at least one AAV particle to a putamen of a subject in need of treatment or amelioration of said disorder, wherein said at least one AAV particle comprises an AADC polynucleotide selected from the group consisting of SEQ ID NOs 2-24 or variants having at least 95% identity thereto.

33. The method of claim 32, wherein the at least one AAV particle comprises a capsid serotype selected from the group consisting of AAV1, AAV2, AAV2G9, AAV3, AAV3a, AAV3b, AAV3-3, AAV4, AAV4-4, AAV5, AAV6, AAV6.1, AAV6.2, AAV6.1.2, AAV7, AAV7.2, AAV8, AAV9, AAV9.11, AAV9.13, AAV9.16, AAV9.24, AAV9.45, AAV9.47, AAV9.61, AAV9.68, AAV9.84, AAV9.9, AAV10, AAV11, AAV12, AAV16.3, AAV24.1, AAV27.3, AAV42.12, AAV42-1b, AAV42-2, AAV42-3a, AAV42-3b, AAV42-4, AAV42-5a, AAV42-5b, AAV42-6b, AAV42-8, AAV42-10, AAV42-11, AAV42-12, AAV42-13, AAV42-15, AAV42-aa, AAV43-1, AAV43-12, AAV43-20, AAV43-21, AAV43-23, AAV43-25, AAV43-5, AAV44.1, AAV44.2, AAV44.5, AAV223.1, AAV223.2, AAV223.4, AAV223.5, AAV223.6, AAV223.7, AAV1-7/rh.48, AAV1-8/rh.49, AAV2-15/rh.62, AAV2-3/rh.61, AAV2-4/rh.50, AAV2-5/rh.51, AAV3.1/hu.6, AAV3.1/hu.9, AAV3-9/rh.52, AAV3-11/rh.53, AAV4-8/rl 1.64, AAV4-9/rh.54, AAV4-19/rh.55, AAV5-3/rh.57, AAV5-22/rh.58, AAV7.3/hu.7, AAV16.8/hu.10, AAV16.12/hu.11, AAV29.3/bb.1, AAV29.5/bb.2, AAV106.1/hu.37, AAV114.3/hu.40, AAV127.2/hu.41, AAV127.5/hu.42, AAV128.3/hu.44, AAV130.4/hu.48, AAV145.1/hu.53, AAV145.5/hu.54, AAV145.6/hu.55, AAV161.10/hu.60, AAV161.6/hu.61, AAV33.12/hu.17, AAV33.4/hu.15, AAV33.8/hu.16, AAV52/hu.19, AAV52.1/hu.20, AAV58.2/hu.25, AAVA3.3, AAVA3.4, AAVA3.5, AAVA3.7, AAVC1, AAVC2, AAVC5, AAV-DJ, AAV-DJ8, AAVF3, AAVF5, AAVH2, AAVrh.72, AAVhu.8, AAVrh.68, AAVrh.70, AAVpi.1, AAVpi.3, AAVpi.2, AAVrh.60, AAVrh.44, AAVrh.65, AAVrh.55, AAVrh.47, AAVrh.69, AAVrh.45, AAVrh.59, AAVhu.12, AAVH6, AAVLK03, AAVH-1/hu.1, AAVH-5/hu.3, AAVLG-10/rh.40, AAVLG-4/rh.38, AAVLG-9/hu.39, AAVN721-8/rh.43, AAVCh.5, AAVCh.5R1, AAVcy.2, AAVcy.3, AAVcy.4, AAVcy.5, AAVCy.5R1, AAVCy.5R2, AAVCy.5R3, AAVCy.5R4, AAVcy.6, AAVhu.1, AAVhu.2, AAVhu.3, AAVhu.4, AAVhu.5, AAVhu.6, AAVhu.7, AAVhu.9, AAVhu.10, AAVhu.11, AAVhu.13, AAVhu.15, AAVhu.16, AAVhu.17, AAVhu.18, AAVhu.20, AAVhu.21, AAVhu.22, AAVhu.23.2, AAVhu.24, AAVhu.25, AAVhu.27, AAVhu.28, AAVhu.29, AAVhu.29R, AAVhu.31, AAVhu.32, AAVhu.34, AAVhu.35, AAVhu.37, AAVhu.39, AAVhu.40, AAVhu.41, AAVhu.42, AAVhu.43, AAVhu.44, AAVhu.44R1, AAVhu.44R2, AAVhu.44R3, AAVhu.45, AAVhu.46, AAVhu.47, AAVhu.48, AAVhu.48R1, AAVhu.48R2, AAVhu.48R3, AAVhu.49, AAVhu.51, AAVhu.52, AAVhu.54, AAVhu.55, AAVhu.56, AAVhu.57, AAVhu.58, AAVhu.60, AAVhu.61, AAVhu.63, AAVhu.64, AAVhu.66, AAVhu.67, AAVhu.14/9, AAVhu.t 19, AAVrh.2, AAVrh.2R, AAVrh.8, AAVrh.8R, AAVrh.10, AAVrh.12, AAVrh.13, AAVrh.13R, AAVrh.14, AAVrh.17, AAVrh.18, AAVrh.19, AAVrh.20, AAVrh.21, AAVrh.22, AAVrh.23, AAVrh.24, AAVrh.25, AAVrh.31, AAVrh.32, AAVrh.33, AAVrh.34, AAVrh.35, AAVrh.36, AAVrh.37, AAVrh.37R2, AAVrh.38, AAVrh.39, AAVrh.40, AAVrh.46, AAVrh.48, AAVrh.48.1, AAVrh.48.1.2, AAVrh.48.2, AAVrh.49, AAVrh.51, AAVrh.52, AAVrh.53, AAVrh.54, AAVrh.56, AAVrh.57, AAVrh.58, AAVrh.61, AAVrh.64, AAVrh.64R1, AAVrh.64R2, AAVrh.67, AAVrh.73, AAVrh.74, AAVrh8R, AAVrh8R A586R mutant, AAVrh8R R533A mutant, AAAV, BAAV, caprine AAV, bovine AAV, AAVhE1.1, AAVhEr1.5, AAVhER1.14, AAVhEr1.8, AAVhEr1.16, AAVhEr1.18, AAVhEr1.35, AAVhEr1.7, AAVhEr1.36, AAVhEr2.29, AAVhEr2.4, AAVhEr2.16, AAVhEr2.30, AAVhEr2.31, AAVhEr2.36, AAVhER1.23, AAVhEr3.1, AAV2.5T, AAV-PAEC, AAV-LK01, AAV-LK02, AAV-LK03, AAV-LK04, AAV-LK05, AAV-LK06, AAV-LK07, AAV-LK08, AAV-LK09, AAV-LK10, AAV-LK11, AAV-LK12, AAV-LK13, AAV-LK14, AAV-LK15, AAV-LK16, AAV-LK17, AAV-LK18, AAV-LK19, AAV-PAEC2, AAV-PAEC4, AAV-PAEC6, AAV-PAEC7, AAV-PAEC8, AAV-PAEC11, AAV-PAEC12, AAV-2-pre-miRNA-101, AAV-8h, AAV-8b, AAV-h, AAV-b, AAV SM 10-2, AAV Shuffle 100-1, AAV Shuffle 100-3, AAV Shuffle 100-7, AAV Shuffle 10-2, AAV Shuffle 10-6, AAV Shuffle 10-8, AAV Shuffle 100-2, AAV SM 10-1, AAV SM 10-8, AAV SM 100-3, AAV SM 100-10, BNP61 AAV, BNP62 AAV, BNP63 AAV, AAVrh.50, AAVrh.43, AAVrh.62, AAVrh.48, AAVhu.19, AAVhu.11, AAVhu.53, AAV4-8/rh.64, AAVLG-9/hu.39, AAV54.5/hu.23, AAV54.2/hu.22, AAV54.7/hu.24, AAV54.1/hu.21, AAV54.4R/hu.27, AAV46.2/hu.28, AAV46.6/hu.29, AAV128.1/hu.43, true type AAV (ttAAV), UPENN AAV 10, Japanese AAV 10, AAV CBr-7.1, AAV CBr-7.10, AAV CBr-7.2, AAV CBr-7.3, AAV CBr-7.4, AAV CBr-7.5, AAV CBr-7.7, AAV CBr-7.8, AAV CBr-B7.3, AAV CBr-B7.4, AAV CBr-E1, AAV CBr-E2, AAV CBr-E3, AAV CBr-E4, AAV CBr-E5, AAV CBr-e5, AAV CBr-E6, AAV CBr-E7, AAV CBr-E8, AAV CHt-1, AAV CHt-2, AAV CHt-3, AAV CHt-6.1, AAV CHt-6.10, AAV CHt-6.5, AAV CHt-6.6, AAV CHt-6.7, AAV CHt-6.8, AAV CHt-P1, AAV CHt-P2, AAV CHt-P5, AAV CHt-P6, AAV CHt-P8, AAV CHt-P9, AAV CKd-1, AAV CKd-10, AAV CKd-2, AAV CKd-3, AAV CKd-4, AAV CKd-6, AAV CKd-7, AAV CKd-8, AAV CKd-B1, AAV CKd-B2, AAV CKd-B3, AAV CKd-B4, AAV CKd-B5, AAV CKd-B6, AAV CKd-B7, AAV CKd-B8, AAV CKd-H1, AAV CKd-H2, AAV CKd-H3, AAV CKd-H4, AAV CKd-H5, AAV CKd-H6, AAV CKd-N3, AAV CKd-N4, AAV CKd-N9, AAV CLg-F1, AAV CLg-F2, AAV CLg-F3, AAV CLg-F4, AAV CLg-F5, AAV CLg-F6, AAV CLg-F7, AAV CLg-F8, AAV CLv-1, AAV CLv1-1, AAV Clv1-10, AAV CLv1-2, AAV CLv-12, AAV CLv1-3, AAV CLv-13, AAV CLv1-4, AAV Clv1-7, AAV Clv1-8, AAV Clv1-9, AAV CLv-2, AAV CLv-3, AAV CLv-4, AAV CLv-6, AAV CLv-8, AAV CLv-D1, AAV CLv-D2, AAV CLv-D3, AAV CLv-D4, AAV CLv-D5, AAV CLv-D6, AAV CLv-D7, AAV CLv-D8, AAV CLv-E1, AAV CLv-K1, AAV CLv-K3, AAV CLv-K6, AAV CLv-L4, AAV CLv-L5, AAV CLv-L6, AAV CLv-M1, AAV CLv-M11, AAV CLv-M2, AAV CLv-M5, AAV CLv-M6, AAV CLv-M7, AAV CLv-M8, AAV CLv-M9, AAV CLv-R1, AAV CLv-R2, AAV CLv-R3, AAV CLv-R4, AAV CLv-R5, AAV CLv-R6, AAV CLv-R7, AAV CLv-R8, AAV CLv-R9, AAV CSp-1, AAV CSp-10, AAV CSp-11, AAV CSp-2, AAV CSp-3, AAV CSp-4, AAV CSp-6, AAV CSp-7, AAV CSp-8, AAV CSp-8.10, AAV CSp-8.2, AAV CSp-8.4, AAV CSp-8.5, AAV CSp-8.6, AAV CSp-8.7, AAV CSp-8.8, AAV CSp-8.9, AAV CSp-9, AAV.hu.48R3, AAV.VR-355, AAV3B, AAV4, AAV5, AAVF1/HSC1, AAVF11/HSC11, AAVF12/HSC12, AAVF13/HSC13, AAVF14/HSC14, AAVF15/HSC15, AAVF16/HSC16, AAVF17/HSC17, AAVF2/HSC2, AAVF3/HSC3, AAVF4/HSC4, AAVF5/HSC5, AAVF6/HSC6, AAVF7/HSC7, AAVF8/HSC8, and/or AAVF9/HSC9.

34. The method of claim 33, wherein the capsid serotype is selected from the group consisting of AAV6, AAVrh10, AAV9 (hu14), AAV-DJ and AAV9.47.

35. The method of claim 32, wherein the AAV particle comprising an AADC polynucleotide further comprises a promoter region, 5′ UTR, 3′ UTR and a poly(A) signal.

36. The method of claim 35, wherein the AADC polynucleotide further comprising at least one 5′ ITR and one 3′ ITR.

37. The method of claim 36, wherein one or more of the 5′ ITRs are located at the 5′ end of the promoter region and one or more of the 3′ ITRs are located at the 3′ end of the poly(A) signal.

38. The method of claim 36, wherein the promoter region comprises an enhancer element, a promoter element, a first exon region, a first intron region, a second intron region and a second exon region.

39. The method of claim 38, wherein the enhancer element and the promoter element are derived from CMV.

40. The method of claim 39, wherein the first exon region is ie1 exon 1 or fragments thereof, the first intron region is ie1 intron 1 or fragments thereof, the second intron region is hBglobin intron 2 or fragments thereof and the second exon region is hBglobin exon 3 or fragments thereof.

41. The method of claim 35, wherein the poly(A) signal is derived from human growth hormone.

42. A method of treating a sleep disorder of a subject comprising contacting said subject with a composition comprising at least one AAV particle to a putamen of a subject in need of treatment or amelioration of said disorder, wherein said at least one AAV particle comprises an AADC polynucleotide selected from the group consisting of SEQ ID NOs 2-24 or variants having at least 95% identity thereto.

43. The method of claim 42, wherein the at least one AAV particle comprises a capsid serotype selected from the group consisting of AAV1, AAV2, AAV2G9, AAV3, AAV3a, AAV3b, AAV3-3, AAV4, AAV4-4, AAV5, AAV6, AAV6.1, AAV6.2, AAV6.1.2, AAV7, AAV7.2, AAV8, AAV9, AAV9.11, AAV9.13, AAV9.16, AAV9.24, AAV9.45, AAV9.47, AAV9.61, AAV9.68, AAV9.84, AAV9.9, AAV10, AAV11, AAV12, AAV16.3, AAV24.1, AAV27.3, AAV42.12, AAV42-1b, AAV42-2, AAV42-3a, AAV42-3b, AAV42-4, AAV42-5a, AAV42-5b, AAV42-6b, AAV42-8, AAV42-10, AAV42-11, AAV42-12, AAV42-13, AAV42-15, AAV42-aa, AAV43-1, AAV43-12, AAV43-20, AAV43-21, AAV43-23, AAV43-25, AAV43-5, AAV44.1, AAV44.2, AAV44.5, AAV223.1, AAV223.2, AAV223.4, AAV223.5, AAV223.6, AAV223.7, AAV1-7/rh.48, AAV1-8/rh.49, AAV2-15/rh.62, AAV2-3/rh.61, AAV2-4/rh.50, AAV2-5/rh.51, AAV3.1/hu.6, AAV3.1/hu.9, AAV3-9/rh.52, AAV3-11/rh.53, AAV4-8/rl 1.64, AAV4-9/rh.54, AAV4-19/rh.55, AAV5-3/rh.57, AAV5-22/rh.58, AAV7.3/hu.7, AAV16.8/hu.10, AAV16.12/hu.11, AAV29.3/bb.1, AAV29.5/bb.2, AAV106.1/hu.37, AAV114.3/hu.40, AAV127.2/hu.41, AAV127.5/hu.42, AAV128.3/hu.44, AAV130.4/hu.48, AAV145.1/hu.53, AAV145.5/hu.54, AAV145.6/hu.55, AAV161.10/hu.60, AAV161.6/hu.61, AAV33.12/hu.17, AAV33.4/hu.15, AAV33.8/hu.16, AAV52/hu.19, AAV52.1/hu.20, AAV58.2/hu.25, AAVA3.3, AAVA3.4, AAVA3.5, AAVA3.7, AAVC1, AAVC2, AAVC5, AAV-DJ, AAV-DJ8, AAVF3, AAVF5, AAVH2, AAVrh.72, AAVhu.8, AAVrh.68, AAVrh.70, AAVpi.1, AAVpi.3, AAVpi.2, AAVrh.60, AAVrh.44, AAVrh.65, AAVrh.55, AAVrh.47, AAVrh.69, AAVrh.45, AAVrh.59, AAVhu.12, AAVH6, AAVLK03, AAVH-1/hu.1, AAVH-5/hu.3, AAVLG-10/rh.40, AAVLG-4/rh.38, AAVLG-9/hu.39, AAVN721-8/rh.43, AAVCh.5, AAVCh.5R1, AAVcy.2, AAVcy.3, AAVcy.4, AAVcy.5, AAVCy.5R1, AAVCy.5R2, AAVCy.5R3, AAVCy.5R4, AAVcy.6, AAVhu.1, AAVhu.2, AAVhu.3, AAVhu.4, AAVhu.5, AAVhu.6, AAVhu.7, AAVhu.9, AAVhu.10, AAVhu.11, AAVhu.13, AAVhu.15, AAVhu.16, AAVhu.17, AAVhu.18, AAVhu.20, AAVhu.21, AAVhu.22, AAVhu.23.2, AAVhu.24, AAVhu.25, AAVhu.27, AAVhu.28, AAVhu.29, AAVhu.29R, AAVhu.31, AAVhu.32, AAVhu.34, AAVhu.35, AAVhu.37, AAVhu.39, AAVhu.40, AAVhu.41, AAVhu.42, AAVhu.43, AAVhu.44, AAVhu.44R1, AAVhu.44R2, AAVhu.44R3, AAVhu.45, AAVhu.46, AAVhu.47, AAVhu.48, AAVhu.48R1, AAVhu.48R2, AAVhu.48R3, AAVhu.49, AAVhu.51, AAVhu.52, AAVhu.54, AAVhu.55, AAVhu.56, AAVhu.57, AAVhu.58, AAVhu.60, AAVhu.61, AAVhu.63, AAVhu.64, AAVhu.66, AAVhu.67, AAVhu.14/9, AAVhu.t 19, AAVrh.2, AAVrh.2R, AAVrh.8, AAVrh.8R, AAVrh.10, AAVrh.12, AAVrh.13, AAVrh.13R, AAVrh.14, AAVrh.17, AAVrh.18, AAVrh.19, AAVrh.20, AAVrh.21, AAVrh.22, AAVrh.23, AAVrh.24, AAVrh.25, AAVrh.31, AAVrh.32, AAVrh.33, AAVrh.34, AAVrh.35, AAVrh.36, AAVrh.37, AAVrh.37R2, AAVrh.38, AAVrh.39, AAVrh.40, AAVrh.46, AAVrh.48, AAVrh.48.1, AAVrh.48.1.2, AAVrh.48.2, AAVrh.49, AAVrh.51, AAVrh.52, AAVrh.53, AAVrh.54, AAVrh.56, AAVrh.57, AAVrh.58, AAVrh.61, AAVrh.64, AAVrh.64R1, AAVrh.64R2, AAVrh.67, AAVrh.73, AAVrh.74, AAVrh8R, AAVrh8R A586R mutant, AAVrh8R R533A mutant, AAAV, BAAV, caprine AAV, bovine AAV, AAVhE1.1, AAVhEr1.5, AAVhER1.14, AAVhEr1.8, AAVhEr1.16, AAVhEr1.18, AAVhEr1.35, AAVhEr1.7, AAVhEr1.36, AAVhEr2.29, AAVhEr2.4, AAVhEr2.16, AAVhEr2.30, AAVhEr2.31, AAVhEr2.36, AAVhER1.23, AAVhEr3.1, AAV2.5T, AAV-PAEC, AAV-LK01, AAV-LK02, AAV-LK03, AAV-LK04, AAV-LK05, AAV-LK06, AAV-LK07, AAV-LK08, AAV-LK09, AAV-LK10, AAV-LK11, AAV-LK12, AAV-LK13, AAV-LK14, AAV-LK15, AAV-LK16, AAV-LK17, AAV-LK18, AAV-LK19, AAV-PAEC2, AAV-PAEC4, AAV-PAEC6, AAV-PAEC7, AAV-PAEC8, AAV-PAEC11, AAV-PAEC12, AAV-2-pre-miRNA-101, AAV-8h, AAV-8b, AAV-h, AAV-b, AAV SM 10-2, AAV Shuffle 100-1, AAV Shuffle 100-3, AAV Shuffle 100-7, AAV Shuffle 10-2, AAV Shuffle 10-6, AAV Shuffle 10-8, AAV Shuffle 100-2, AAV SM 10-1, AAV SM 10-8, AAV SM 100-3, AAV SM 100-10, BNP61 AAV, BNP62 AAV, BNP63 AAV, AAVrh.50, AAVrh.43, AAVrh.62, AAVrh.48, AAVhu.19, AAVhu.11, AAVhu.53, AAV4-8/rh.64, AAVLG-9/hu.39, AAV54.5/hu.23, AAV54.2/hu.22, AAV54.7/hu.24, AAV54.1/hu.21, AAV54.4R/hu.27, AAV46.2/hu.28, AAV46.6/hu.29, AAV128.1/hu.43, true type AAV (ttAAV), UPENN AAV 10, Japanese AAV 10, AAV CBr-7.1, AAV CBr-7.10, AAV CBr-7.2, AAV CBr-7.3, AAV CBr-7.4, AAV CBr-7.5, AAV CBr-7.7, AAV CBr-7.8, AAV CBr-B7.3, AAV CBr-B7.4, AAV CBr-E1, AAV CBr-E2, AAV CBr-E3, AAV CBr-E4, AAV CBr-E5, AAV CBr-e5, AAV CBr-E6, AAV CBr-E7, AAV CBr-E8, AAV CHt-1, AAV CHt-2, AAV CHt-3, AAV CHt-6.1, AAV CHt-6.10, AAV CHt-6.5, AAV CHt-6.6, AAV CHt-6.7, AAV CHt-6.8, AAV CHt-P1, AAV CHt-P2, AAV CHt-P5, AAV CHt-P6, AAV CHt-P8, AAV CHt-P9, AAV CKd-1, AAV CKd-10, AAV CKd-2, AAV CKd-3, AAV CKd-4, AAV CKd-6, AAV CKd-7, AAV CKd-8, AAV CKd-B1, AAV CKd-B2, AAV CKd-B3, AAV CKd-B4, AAV CKd-B5, AAV CKd-B6, AAV CKd-B7, AAV CKd-B8, AAV CKd-H1, AAV CKd-H2, AAV CKd-H3, AAV CKd-H4, AAV CKd-H5, AAV CKd-H6, AAV CKd-N3, AAV CKd-N4, AAV CKd-N9, AAV CLg-F1, AAV CLg-F2, AAV CLg-F3, AAV CLg-F4, AAV CLg-F5, AAV CLg-F6, AAV CLg-F7, AAV CLg-F8, AAV CLv-1, AAV CLv1-1, AAV Clv1-10, AAV CLv1-2, AAV CLv-12, AAV CLv1-3, AAV CLv-13, AAV CLv1-4, AAV Clv1-7, AAV Clv1-8, AAV Clv1-9, AAV CLv-2, AAV CLv-3, AAV CLv-4, AAV CLv-6, AAV CLv-8, AAV CLv-D1, AAV CLv-D2, AAV CLv-D3, AAV CLv-D4, AAV CLv-D5, AAV CLv-D6, AAV CLv-D7, AAV CLv-D8, AAV CLv-E1, AAV CLv-K1, AAV CLv-K3, AAV CLv-K6, AAV CLv-L4, AAV CLv-L5, AAV CLv-L6, AAV CLv-M1, AAV CLv-M11, AAV CLv-M2, AAV CLv-M5, AAV CLv-M6, AAV CLv-M7, AAV CLv-M8, AAV CLv-M9, AAV CLv-R1, AAV CLv-R2, AAV CLv-R3, AAV CLv-R4, AAV CLv-R5, AAV CLv-R6, AAV CLv-R7, AAV CLv-R8, AAV CLv-R9, AAV CSp-1, AAV CSp-10, AAV CSp-11, AAV CSp-2, AAV CSp-3, AAV CSp-4, AAV CSp-6, AAV CSp-7, AAV CSp-8, AAV CSp-8.10, AAV CSp-8.2, AAV CSp-8.4, AAV CSp-8.5, AAV CSp-8.6, AAV CSp-8.7, AAV CSp-8.8, AAV CSp-8.9, AAV CSp-9, AAV.hu.48R3, AAV.VR-355, AAV3B, AAV4, AAV5, AAVF1/HSC1, AAVF11/HSC11, AAVF12/HSC12, AAVF13/HSC13, AAVF14/HSC14, AAVF15/HSC15, AAVF16/HSC16, AAVF17/HSC17, AAVF2/HSC2, AAVF3/HSC3, AAVF4/HSC4, AAVF5/HSC5, AAVF6/HSC6, AAVF7/HSC7, AAVF8/HSC8, and/or AAVF9/HSC9.

44. The method of claim 43, wherein the capsid serotype is selected from the group consisting of AAV6, AAVrh10, AAV9 (hu14), AAV-DJ and AAV9.47.

45. The method of claim 42, wherein the at least one AAV particle comprising an AADC polynucleotide further comprises a promoter region, 5′ UTR, 3′ UTR and a poly(A) signal.

46. The method of claim 45, wherein the AADC polynucleotide further comprising at least one 5′ ITR and one 3′ ITR.

47. The method of claim 46, wherein one or more of the 5′ ITRs are located at the 5′ end of the promoter region and one or more of the 3′ ITRs are located at the 3′ end of the poly(A) signal.

48. The method of claim 46, wherein the promoter region comprises an enhancer element, a promoter element, a first exon region, a first intron region, a second intron region and a second exon region.

49. The method of claim 48, wherein the enhancer element and the promoter element are derived from CMV.

50. The method of claim 49, wherein the first exon region is ie1 exon 1 or fragments thereof, the first intron region is ie1 intron 1 or fragments thereof, the second intron region is hBglobin intron 2 or fragments thereof and the second exon region is hBglobin exon 3 or fragments thereof.

51. The method of claim 45, wherein the poly(A) signal is derived from human growth hormone.

The application's sequence listing, which the Patent Office published only in electronic form, follows.

SEQUENCE LISTING (898 sequences)

SEQ ID NO: 1 - protein, 480 aa, Homo sapiens
MNASEFRRRGKEMVDYVANYMEGIEGRQVYPDVEPGYLRPLIPAAAPQEPDTFEDIINDVEKIIMPGVTHWHSPYFFAYFPTASSYPAMLADMLCGAIGCIGFSWAASPACTELETVMMDWLGKMLELPKAFLNEKAGEGGGVIQGSASEATLVALLAARTKVIHRLQAASPELTQAAIMEKLVAYSSDQAHSSVERAGLIGGVKLKAIPSDGNFAMRASALQEALERDKAAGLIPFFMVATLGTTTCCSFDNLLEVGPICNKEDIWLHVDAAYAGSAFICPEFRHLLNGVEFADSFNFNPHKWLLVNFDCSAMWVKKRTDLTGAFRLDPTYLKHSHQDSGLITDYRHWQIPLGRRFRSLKMWFVFRMYGVKGLQAYIRKHVQLSHEFESLVRQDPRFEICVEVILGLVCFRLKGSNKVNEALLQRINSAKKIHLVPCHLRDKFVLRFAICSRTVESAHVQRAWEHIKELAADVLRAERE

SEQ ID NO: 2 - DNA, 8150 bp, Artificial Sequence
  Description of Artificial Sequence: Synthetic polynucleotide
cattcgccattcaggctgcaaataagcgttgatattcagtcaattacaaacattaataacgaagagatgacagaaaaattttcattctgtgacagagaaaaagtagccgaagatgacggtttgtcacatggagttggcaggatgtttgattaaaaacataacaggaagaaaaatgccccgctgtgggcggacaaaatagttgggaactgggaggggtggaaatggagtttttaaggattatttagggaagagtgacaaaatagatgggaactgggtgtagcgtcgtaagctaatacgaaaattaaaaatgacaaaatagtttggaactagatttcacttatctggttcggatctcctaggcgatatcagtgatcagatccagacatgataagatacattgatgagtttggacaaaccacaactagaatgcagtgaaaaaaatgctttatttgtgaaatttgtgatgctattgctttatttgtaaccattataagctgcaataaacaagttaacaacaacaattgcattcattttatgtttcaggttcagggggaggtgtgggaggttttttaaagcaagtaaaacctctacaaatgtggtatggctgattatgatcctctagtacttctcgacaagcttacattattgaagcatttatcagggttattgtctcagacctgcaggcagctgcgcgctcgctcgctcactgaggccgcccgggcaaagcccgggcgtcgggcgacctttggtcgcccggcctcagtgagcgagcgagcgcgcagagagggagtggccaactccatcactaggggttccttgtagttaatgattaacccgccatgctacttatctacgtagccatgctctagagcggccgcacgcgtggagctagttattaatagtaatcaattacggggtcattagttcatagcccatatatggagttccgcgttacataacttacggtaaatggcccgcctggctgaccgcccaacgacccccgcccattgacgtcaataatgacgtatgttcccatagtaacgtcaatagggactttccattgacgtcaatgggtggagtatttacggtaaactgcccacttggcagtacatcaagtgtatcatatgccaagtacgccccctattgacgtcaatgacggtaaatggcccgcctggcattatgcccagtacatgaccttatgggactttcctacttggcagtacatctacgtattagtcatcgctattaccatggtgatgcggttttggcagtacatcaatgggcgtggatagcggtttgactcacggggatttccaagtctccaccccattgacgtcaatgggagtttgttttgcaccaaaatcaacgggactttccaaaatgtcgtaacaactccgccccattgacgcaaatgggcggtaggcgtgtacggtgggaggtctatataagcagagctcgtttagtgaaccgtcagatcgcctggagacgccatccacgctgttttgacctccatagaagacaccgggaccgatccagcctccgcggattcgaatcccggccgggaacggtgcattggaacgcggattccccgtgccaagagtgacgtaagtaccgcctatagagtctataggcccacaaaaaatgctttcttcttttaatatacttttttgtttatcttatttctaatactttccctaatctctttctttcagggcaataatgatacaatgtatcatgcctctttgcaccattctaaagaataacagtgataatttctgggttaaggcaatagcaatatttctgcatataaatatttctgcatataaattgtaactgatgtaagaggtttcatattgctaatagcagctacaatccagctaccattctgcttttattttatggttgggataaggctggattattctgagtccaagctaggcccttttgctaatcatgttcatacctcttatcttcctcccacagctcctgggcaacgtgctggtctgtgtgctggcccatcactttggcaaagaattgggattcgaacatcggccgccaccatgaacgcaagtgaattccgaaggagagggaaggagatggtggattacgtggccaactacatggaaggcattgagggacgccaggtctaccctgacgtggagcccgggtacctgcggccgctgatccctgccgctgcccctcaggagccagacacgtttgaggacatcatcaacgacgttgagaagataatcatgcctggggtgacgcactggcacagcccctacttcttcgcctacttccccactgccagctcgtacccggccatgcttgcggacatgctgtgcggggccattggctgcatcggcttctcctgggcggcaagcccagcatgcacagagctggagactgtgatgatggactggctcgggaagatgctggaactaccaaaggcatttttgaatgagaaagctggagaagggggaggagtgatccagggaagtgccagtgaagccaccctggtggccctgctggccgctcggaccaaagtgatccatcggctgcaggcagcgtccccagagctcacacaggccgctatcatggagaagctggtggcttactcatccgatcaggcacactcctcagtggaaagagctgggttaattggtggagtgaaattaaaagccatcccctcagatggcaacttcgccatgcgtgcgtctgccctgcaggaagccctggagagagacaaagcggctggcctgattcctttctttatggttgccaccctggggaccacaacatgctgctcctttgacaatctcttagaagtcggtcctatctgcaacaaggaagacatatggctgcacgttgatgcagcctacgcaggcagtgcattcatctgccctgagttccggcaccttctgaatggagtggagtttgcagattcattcaactttaatccccacaaatggctattggtgaattttgactgttctgccatgtgggtgaaaaagagaacagacttaacgggagcctttagactggaccccacttacctgaagcacagccatcaggattcagggcttatcactgactaccggcattggcagataccactgggcagaagatttcgctctttgaaaatgtggtttgtatttaggatgtatggagtcaaaggactgcaggcttatatccgcaagcatgtccagctgtcccatgagtttgagtcactggtgcgccaggatccccgctttgaaatctgtgtggaagtcattctggggcttgtctgctttcggctaaagggttccaacaaagtgaatgaagctcttctgcaaagaataaacagtgccaaaaaaatccacttggttccatgtcacctcagggacaagtttgtcctgcgctttgccatctgttctcgcacggtggaatctgcccatgtgcagcgggcctgggaacacatcaaagagctggcggccgacgtgctgcgagcagagagggagtaggagtgagctgctcgagagatctacgggtggcatccctgtgacccctccccagtgcctctcctggccctggaagttgccactccagtgcccaccagccttgtcctaataaaattaagttgcatcattttgtctgactaggtgtccttctataatattatggggtggaggggggtggtatggagcaaggggcaagttgggaagacaacctgtagggcctgcggggtctattgggaaccaagctggagtgcagtggcacaatcttggctcactgcaatctccgcctcctgggttcaagcgattctcctgcctcagcctcccgagttgttgggattccaggcatgcatgaccaggctcagctaatttttgtttttttggtagagacggggtttcaccatattggccaggctggtctccaactcctaatctcaggtgatctacccaccttggcctcccaaattgctgggattacaggcgtgaaccactgctcccttccctgtccttctgattttgtaggtaaccccggaccacgtgcggaccgagcggccgctctagagcatggctacgtagataagtagcatggcgggttaatcattaactacaaggaacccctagtgatggagttggccactccctctctgcgcgctcgctcgctcactgaggccgggcgaccaaaggtcgcccgacgcccgggcggcctcagtgagcgagcgagcgcgcagctgcctgcaggtctgagacaataaccctgataaatgcttcaataatgtagccaaccactagaactatagctagagtcctgggcgaacaaacgatgctcgccttccagaaaaccgaggatgcgaaccacttcatccggggtcagcaccaccggcaagcgccgcgacggccgaggtcttccgatctcctgaagccagggcagatccgtgcacagcaccttgccgtagaagaacagcaaggccgccaatgcctgacgatgcgtggagaccgaaaccttgcgctcgttcgccagccaggacagaaatgcctcgacttcgctgctgcccaaggttgccgggtgacgcacaccgtggaaacggatgaaggcacgaacccagttgacataagcctgttcggttcgtaaactgtaatgcaagtagcgtatgcgctcacgcaactggtccagaaccttgaccgaacgcagcggtggtaacggcgcagtggcggttttcatggcttgttatgactgtttttttgtacagtctatgcctcgggcatccaagcagcaagcgcgttacgccgtgggtcgatgtttgatgttatggagcagcaacgatgttacgcagcagcaacgatgttacgcagcagggcagtcgccctaaaacaaagttaggtggctcaagtatgggcatcattcgcacatgtaggctcggccctgaccaagtcaaatccatgcgggctgctcttgatcttttcggtcgtgagttcggagacgtagccacctactcccaacatcagccggactccgattacctcgggaacttgctccgtagtaagacattcatcgcgcttgctgccttcgaccaagaagcggttgttggcgctctcgcggcttacgttctgcccaagtttgagcagccgcgtagtgagatctatatctatgatctcgcagtctccggcgagcaccggaggcagggcattgccaccgcgctcatcaatctcctcaagcatgaggccaacgcgcttggtgcttatgtgatctacgtgcaagcagattacggtgacgatcccgcagtggctctctatacaaagttgggcatacgggaagaagtgatgcactttgatatcgacccaagtaccgccacctaacaattcgttcaagccgagatcggcttcccggccgcggagttgttcggtaaattgtcacaacgccgcgaatatagtctttaccatgcccttggccacgcccctctttaatacgacgggcaatttgcacttcagaaaatgaagagtttgctttagccataacaaaagtccagtatgctttttcacagcataactggactgatttcagtttacaactattctgtctagtttaagactttattgtcatagtttagatctattttgttcagtttaagactttattgtccgcccacacccgcttacgcagggcatccatttattactcaaccgtaaccgattttgccaggttacgcggctggtctatgcggtgtgaaataccgcacagatgcgtaaggagaaaataccgcatcaggcgctcttccgcttcctcgctcactgactcgctgcgctcggtcgttcggctgcggcgagcggtatcagctcactcaaaggcggtaatacggttatccacagaatcaggggataacgcaggaaagaacatgtgagcaaaaggccagcaaaaggccaggaaccgtaaaaaggccgcgttgctggcgtttttccataggctccgcccccctgacgagcatcacaaaaatcgacgctcaagtcagaggtggcgaaacccgacaggactataaagataccaggcgtttccccctggaagctccctcgtgcgctctcctgttccgaccctgccgcttaccggatacctgtccgcctttctcccttcgggaagcgtggcgctttctcatagctcacgctgtaggtatctcagttcggtgtaggtcgttcgctccaagctgggctgtgtgcacgaaccccccgttcagcccgaccgctgcgccttatccggtaactatcgtcttgagtccaacccggtaagacacgacttatcgccactggcagcagccactggtaacaggattagcagagcgaggtatgtaggcggtgctacagagttcttgaagtggtggcctaactacggctacactagaagaacagtatttggtatctgcgctctgctgaagccagttaccttcggaaaaagagttggtagctcttgatccggcaaacaaaccaccgctggtagcggtggtttttttgtttgcaagcagcagattacgcgcagaaaaaaaggatctcaagaagatcctttgatcttttctacggggtctgacgctcagtggaacgaaaactcacgttaagggattttggtcatgagattatcaaaaaggatcttcacctagatccttttaaattaaaaatgaagttttaaatcaatctaaagtatatatgagtaaacttggtctgacagttaccaatgcttaatcagtgaggcacctatctcagcgatctgtctatttcgttcatccatagttgcctgactccccgtcgtgtagataactacgatacgggagggcttaccatctggccccagtgctgcaatgataccgcgagacccacgctcaccggctccagatttatcagcaataaaccagccagccggaagggccgagcgcagaagtggtcctgcaactttatccgcctccatccagtctattaattgttgccgggaagctagagtaagtagttcgccagttaatagtttgcgcaacgttgttgccattgctacaggcatcgtggtgtcacgctcgtcgtttggtatggcttcattcagctccggttcccaacgatcaaggcgagttacatgatcccccatgttgtgcaaaaaagcggttagctccttcggtcctccgatcgttgtcagaagtaagttggccgcagtgttatcactcatggttatggcagcactgcataattctcttactgtcatgccatccgtaagatgcttttctgtgactggtgagtactcaaccaagtcattctgagaatagtgtatgcggcgaccgagttgctcttgcccggcgtcaatacgggataataccgcgccacatagcagaactttaaaagtgctcatcattggaaaacgttcttcggggcgaaaactctcaaggatcttaccgctgttgagatccagttcgatgtaacccactcgtgcacccaactgatcttcagcatcttttactttcaccagcgtttctgggtgagcaaaaacaggaaggcaaaatgccgcaaaaaagggaataagggcgacacggaaatgttgaatactcatactcttcctttttcaatattattgaagcatttatcagggttattgtctcatgagcggatacatatttgaatgtatttagaaaaataaacaaataggggttccgcgcacatttccccgaaaagtgccacctaaattgtaagcgttaatattttgttaaaattcgcgttaaatttttgttaaatcagctcattttttaaccaataggccgaaatcggcaaaatcccttataaatcaaaagaatagaccgagatagggttgagtgttgttccagtttggaacaagagtccactattaaagaacgtggactccaacgtcaaagggcgaaaaaccgtctatcagggcgatggcccactacgtgaaccatcaccctaatcaagttttttggggtcgaggtgccgtaaagcactaaatcggaaccctaaagggagcccccgatttagagcttgacggggaaagccggcgaacgtggcgagaaaggaagggaagaaagcgaaaggagcgggcgctagggcgctggcaagtgtagcggtcacgctgcgcgtaaccaccacacccgccgcgcttaatgcgccgctacagggcgcgtc

SEQ ID NO: 3 - DNA, 8149 bp, Artificial Sequence
  Description of Artificial Sequence: Synthetic polynucleotide
cattcgccattcaggctgcaaataagcgttgatattcagtcaattacaaacattaataacgaagagatgacagaaaaattttcattctgtgacagagaaaaagtagccgaagatgacggtttgtcacatggagttggcaggatgtttgattaaaaacataacaggaagaaaaatgccccgctgtgggcggacaaaatagttgggaactgggaggggtggaaatggagtttttaaggattatttagggaagagtgacaaaatagatgggaactgggtgtagcgtcgtaagctaatacgaaaattaaaaatgacaaaatagtttggaactagatttcacttatctggttcggatctcctaggcgatatcagtgatcagatccagacatgataagatacattgatgagtttggacaaaccacaactagaatgcagtgaaaaaaatgctttatttgtgaaatttgtgatgctattgctttatttgtaaccattataagctgcaataaacaagttaacaacaacaattgcattcattttatgtttcaggttcagggggaggtgtgggaggttttttaaagcaagtaaaacctctacaaatgtggtatggctgattatgatcctctagtacttctcgacaagcttacattattgaagcatttatcagggttattgtctcagacctgcaggcagctgcgcgctcgctcgctcactgaggccgcccgggcaaagcccgggcgtcgggcgacctttggtcgcccggcctcagtgagcgagcgagcgcgcagagagggagtggccaactccatcactaggggttccttgtagttaatgattaacccgccatgctacttatctacgtagccatgctctagagcggccgcacgcgtggagctagttattaatagtaatcaattacggggtcattagttcatagcccatatatggagttccgcgttacataacttacggtaaatggcccgcctggctgaccgcccaacgacccccgcccattgacgtcaataatgacgtatgttcccatagtaacgtcaatagggactttccattgacgtcaatgggtggagtatttacggtaaactgcccacttggcagtacatcaagtgtatcatatgccaagtacgccccctattgacgtcaatgacggtaaatggcccgcctggcattatgcccagtacatgaccttatgggactttcctacttggcagtacatctacgtattagtcatcgctattaccatggtgatgcggttttggcagtacatcaatgggcgtggatagcggtttgactcacggggatttccaagtctccaccccattgacgtcaatgggagtttgttttgcaccaaaatcaacgggactttccaaaatgtcgtaacaactccgccccattgacgcaaatgggcggtaggcgtgtacggtgggaggtctatataagcagagctcgtttagtgaaccgtcagatcgcctggagacgccatccacgctgttttgacctccatagaagacaccgggaccgatccagcctccgcggattcgaatcccggccgggaacggtgcattggaacgcggattccccgtgccaagagtgacgtaagtaccgcctatagagtctataggcccacaaaaaatgctttcttcttttaatatacttttttgtttatcttatttctaatactttccctaatctctttctttcagggcaataatgatacaatgtatcatgcctctttgcaccattctaaagaataacagtgataatttctgggttaaggcaatagcaatatttctgcatataaatatttctgcatataaattgtaactgatgtaagaggtttcatattgctaatagcagctacaatccagctaccattctgcttttattttatggttgggataaggctggattattctgagtccaagctaggcccttttgctaatcatgttcatacctcttatcttcctcccacagctcctgggcaacgtgctggtctgtgtgctggcccatcactttggcaaagaattgggattcgaacatcggccgccaccatgaacgccagcgagttcaggaggaggggcaaggagatggtggactacgtggccaactacatggagggcatcgagggcaggcaggtgtaccccgacgtggagcccggctacctgaggcccctgatccccgccgccgccccccaggagcccgacaccttcgaggacatcatcaacgacgtggagaagatcatcatgcccggcgtgacccactggcacagcccctacttcttcgcctacttccccaccgccagcagctaccccgccatgctggccgacatgctgtgcggcgccatcggctgcatcggcttcagctgggccgccagccccgcctgcaccgagctggagaccgtgatgatggactggctgggcaagatgctggagctgcccaaggccttcctgaacgagaaggccggcgagggcggcggcgtgatccagggcagcgccagcgaggccaccctggtggccctgctggccgccaggaccaaggtgatccacaggctgcaggccgccagccccgagctgacccaggccgccatcatggagaagctggtggcctacagcagcgaccaggcccacagcagcgtggagagggccggcctgatcggcggcgtgaagctgaaggccatccccagcgacggcaacttcgccatgagggccagcgccctgcaggaggccctggagagggacaaggccgccggcctgatccccttcttcatggtggccaccctgggcaccaccacctgctgcagcttcgacaacctgctggaggtgggccccatctgcaacaaggaggacatctggctgcacgtggacgccgcctacgccggcagcgccttcatctgccccgagttcaggcacctgctgaacggcgtggagttcgccgacagcttcaacttcaacccccacaagtggctgctggtgaacttcgactgcagcgccatgtgggtgaagaagaggaccgacctgaccggcgccttcaggctggaccccacctacctgaagcacagccaccaggacagcggcctgatcaccgactacaggcactggcagatccccctgggcaggaggttcaggagcctgaagatgtggttcgtgttcaggatgtacggcgtgaagggcctgcaggcctacatcaggaagcacgtgcagctgagccacgagttcgagagcctggtgaggcaggaccccaggttcgagatctgcgtggaggtgatcctgggcctggtgtgcttcaggctgaagggcagcaacaaggtgaacgaggccctgctgcagaggatcaacagcgccaagaagatccacctggtgccctgccacctgagggacaagttcgtgctgaggttcgccatctgcagcaggaccgtggagagcgcccacgtgcagagggcctgggagcacatcaaggagctggccgccgacgtgctgagggccgagagggagtgagctgctcgagagatctacgggtggcatccctgtgacccctccccagtgcctctcctggccctggaagttgccactccagtgcccaccagccttgtcctaataaaattaagttgcatcattttgtctgactaggtgtccttctataatattatggggtggaggggggtggtatggagcaaggggcaagttgggaagacaacctgtagggcctgcggggtctattgggaaccaagctggagtgcagtggcacaatcttggctcactgcaatctccgcctcctgggttcaagcgattctcctgcctcagcctcccgagttgttgggattccaggcatgcatgaccaggctcagctaatttttgtttttttggtagagacggggtttcaccatattggccaggctggtctccaactcctaatctcaggtgatctacccaccttggcctcccaaattgctgggattacaggcgtgaaccactgctcccttccctgtccttctgattttgtaggtaacgtaaccccggaccacgtgcggaccgagcggccgctctagagcatggctacgtagataagtagcatggcgggttaatcattaactacaaggaacccctagtgatggagttggccactccctctctgcgcgctcgctcgctcactgaggccgggcgaccaaaggtcgcccgacgcccgggcggcctcagtgagcgagcgagcgcgcagctgcctgcaggtctgagacaataaccctgataaatgcttcaataatgtagccaaccactagaactatagctagagtcctgggcgaacaaacgatgctcgccttccagaaaaccgaggatgcgaaccacttcatccggggtcagcaccaccggcaagcgccgcgacggccgaggtcttccgatctcctgaagccagggcagatccgtgcacagcaccttgccgtagaagaacagcaaggccgccaatgcctgacgatgcgtggagaccgaaaccttgcgctcgttcgccagccaggacagaaatgcctcgacttcgctgctgcccaaggttgccgggtgacgcacaccgtggaaacggatgaaggcacgaacccagttgacataagcctgttcggttcgtaaactgtaatgcaagtagcgtatgcgctcacgcaactggtccagaaccttgaccgaacgcagcggtggtaacggcgcagtggcggttttcatggcttgttatgactgtttttttgtacagtctatgcctcgggcatccaagcagcaagcgcgttacgccgtgggtcgatgtttgatgttatggagcagcaacgatgttacgcagcagcaacgatgttacgcagcagggcagtcgccctaaaacaaagttaggtggctcaagtatgggcatcattcgcacatgtaggctcggccctgaccaagtcaaatccatgcgggctgctcttgatcttttcggtcgtgagttcggagacgtagccacctactcccaacatcagccggactccgattacctcgggaacttgctccgtagtaagacattcatcgcgcttgctgccttcgaccaagaagcggttgttggcgctctcgcggcttacgttctgcccaagtttgagcagccgcgtagtgagatctatatctatgatctcgcagtctccggcgagcaccggaggcagggcattgccaccgcgctcatcaatctcctcaagcatgaggccaacgcgcttggtgcttatgtgatctacgtgcaagcagattacggtgacgatcccgcagtggctctctatacaaagttgggcatacgggaagaagtgatgcactttgatatcgacccaagtaccgccacctaacaattcgttcaagccgagatcggcttcccggccgcggagttgttcggtaaattgtcacaacgccgcgaatatagtctttaccatgcccttggccacgcccctctttaatacgacgggcaatttgcacttcagaaaatgaagagtttgctttagccataacaaaagtccagtatgctttttcacagcataactggactgatttcagtttacaactattctgtctagtttaagactttattgtcatagtttagatctattttgttcagtttaagactttattgtccgcccacacccgcttacgcagggcatccatttattactcaaccgtaaccgattttgccaggttacgcggctggtctatgcggtgtgaaataccgcacagatgcgtaaggagaaaataccgcatcaggcgctcttccgcttcctcgctcactgactcgctgcgctcggtcgttcggctgcggcgagcggtatcagctcactcaaaggcggtaatacggttatccacagaatcaggggataacgcaggaaagaacatgtgagcaaaaggccagcaaaaggccaggaaccgtaaaaaggccgcgttgctggcgtttttccataggctccgcccccctgacgagcatcacaaaaatcgacgctcaagtcagaggtggcgaaacccgacaggactataaagataccaggcgtttccccctggaagctccctcgtgcgctctcctgttccgaccctgccgcttaccggatacctgtccgcctttctcccttcgggaagcgtggcgctttctcatagctcacgctgtaggtatctcagttcggtgtaggtcgttcgctccaagctgggctgtgtgcacgaaccccccgttcagcccgaccgctgcgccttatccggtaactatcgtcttgagtccaacccggtaagacacgacttatcgccactggcagcagccactggtaacaggattagcagagcgaggtatgtaggcggtgctacagagttcttgaagtggtggcctaactacggctacactagaagaacagtatttggtatctgcgctctgctgaagccagttaccttcggaaaaagagttggtagctcttgatccggcaaacaaaccaccgctggtagcggtggtttttttgtttgcaagcagcagattacgcgcagaaaaaaaggatctcaagaagatcctttgatcttttctacggggtctgacgctcagtggaacgaaaactcacgttaagggattttggtcatgagattatcaaaaaggatcttcacctagatccttttaaattaaaaatgaagttttaaatcaatctaaagtatatatgagtaaacttggtctgacagttaccaatgcttaatcagtgaggcacctatctcagcgatctgtctatttcgttcatccatagttgcctgactccccgtcgtgtagataactacgatacgggagggcttaccatctggccccagtgctgcaatgataccgcgagacccacgctcaccggctccagatttatcagcaataaaccagccagccggaagggccgagcgcagaagtggtcctgcaactttatccgcctccatccagtctattaattgttgccgggaagctagagtaagtagttcgccagttaatagtttgcgcaacgttgttgccattgctacaggcatcgtggtgtcacgctcgtcgtttggtatggcttcattcagctccggttcccaacgatcaaggcgagttacatgatcccccatgttgtgcaaaaaagcggttagctccttcggtcctccgatcgttgtcagaagtaagttggccgcagtgttatcactcatggttatggcagcactgcataattctcttactgtcatgccatccgtaagatgcttttctgtgactggtgagtactcaaccaagtcattctgagaatagtgtatgcggcgaccgagttgctcttgcccggcgtcaatacgggataataccgcgccacatagcagaactttaaaagtgctcatcattggaaaacgttcttcggggcgaaaactctcaaggatcttaccgctgttgagatccagttcgatgtaacccactcgtgcacccaactgatcttcagcatcttttactttcaccagcgtttctgggtgagcaaaaacaggaaggcaaaatgccgcaaaaaagggaataagggcgacacggaaatgttgaatactcatactcttcctttttcaatattattgaagcatttatcagggttattgtctcatgagcggatacatatttgaatgtatttagaaaaataaacaaataggggttccgcgcacatttccccgaaaagtgccacctaaattgtaagcgttaatattttgttaaaattcgcgttaaatttttgttaaatcagctcattttttaaccaataggccgaaatcggcaaaatcccttataaatcaaaagaatagaccgagatagggttgagtgttgttccagtttggaacaagagtccactattaaagaacgtggactccaacgtcaaagggcgaaaaaccgtctatcagggcgatggcccactacgtgaaccatcaccctaatcaagttttttggggtcgaggtgccgtaaagcactaaatcggaaccctaaagggagcccccgatttagagcttgacggggaaagccggcgaacgtggcgagaaaggaagggaagaaagcgaaaggagcgggcgctagggcgctggcaagtgtagcggtcacgctgcgcgtaaccaccacacccgccgcgcttaatgcgccgctacagggcgcgtc

SEQ ID NO: 4 - DNA, 8555 bp, Artificial Sequence
  Description of Artificial Sequence: Synthetic polynucleotide
cattcgccattcaggctgcaaataagcgttgatattcagtcaattacaaacattaataacgaagagatgacagaaaaattttcattctgtgacagagaaaaagtagccgaagatgacggtttgtcacatggagttggcaggatgtttgattaaaaacataacaggaagaaaaatgccccgctgtgggcggacaaaatagttgggaactgggaggggtggaaatggagtttttaaggattatttagggaagagtgacaaaatagatgggaactgggtgtagcgtcgtaagctaatacgaaaattaaaaatgacaaaatagtttggaactagatttcacttatctggttcggatctcctaggcgatatcagtgatcagatccagacatgataagatacattgatgagtttggacaaaccacaactagaatgcagtgaaaaaaatgctttatttgtgaaatttgtgatgctattgctttatttgtaaccattataagctgcaataaacaagttaacaacaacaattgcattcattttatgtttcaggttcagggggaggtgtgggaggttttttaaagcaagtaaaacctctacaaatgtggtatggctgattatgatcctctagtacttctcgacaagcttacattattgaagcatttatcagggttattgtctcagacctgcaggcagctgcgcgctcgctcgctcactgaggccgcccgggcaaagcccgggcgtcgggcgacctttggtcgcccggcctcagtgagcgagcgagcgcgcagagagggagtggccaactccatcactaggggttccttgtagttaatgattaacccgccatgctacttatctacgtagccatgctctagagcggccgcacgcgtggagctagttattaatagtaatcaattacggggtcattagttcatagcccatatatggagttccgcgttacataacttacggtaaatggcccgcctggctgaccgcccaacgacccccgcccattgacgtcaataatgacgtatgttcccatagtaacgtcaatagggactttccattgacgtcaatgggtggagtatttacggtaaactgcccacttggcagtacatcaagtgtatcatatgccaagtacgccccctattgacgtcaatgacggtaaatggcccgcctggcattatgcccagtacatgaccttatgggactttcctacttggcagtacatctacgtattagtcatcgctattaccatggtgatgcggttttggcagtacatcaatgggcgtggatagcggtttgactcacggggatttccaagtctccaccccattgacgtcaatgggagtttgttttgcaccaaaatcaacgggactttccaaaatgtcgtaacaactccgccccattgacgcaaatgggcggtaggcgtgtacggtgggaggtctatataagcagagctcgtttagtgaaccgtcagatcgcctggagacgccatccacgctgttttgacctccatagaagacaccgggaccgatccagcctccgcggattcgaatcccggccgggaacggtgcattggaacgcggattccccgtgccaagagtgacgtaagtaccgcctatagagtctataggcccacaaaaaatgctttcttcttttaatatacttttttgtttatcttatttctaatactttccctaatctctttctttcagggcaataatgatacaatgtatcatgcctctttgcaccattctaaagaataacagtgataatttctgggttaaggcaatagcaatatttctgcatataaatatttctgcatataaattgtaactgatgtaagaggtttcatattgctaatagcagctacaatccagctaccattctgcttttattttatggttgggataaggctggattattctgagtccaagctaggcccttttgctaatcatgttcatacctcttatcttcctcccacagctcctgggcaacgtgctggtctgtgtgctggcccatcactttggcaaagaattgggattcgaacatcggccgccaccatgaacgcaagtgaattccgaaggagagggaaggagatggtggattacgtggccaactacatggaaggcattgagggacgccaggtctaccctgacgtggagcccgggtacctgcggccgctgatccctgccgctgcccctcaggagccagacacgtttgaggacatcatcaacgacgttgagaagataatcatgcctggggtgacgcactggcacagcccctacttcttcgcctacttccccactgccagctcgtacccggccatgcttgcggacatgctgtgcggggccattggctgcatcggcttctcctgggcggcaagcccagcatgcacagagctggagactgtgatgatggactggctcgggaagatgctggaactaccaaaggcatttttgaatgagaaagctggagaagggggaggagtgatccagggaagtgccagtgaagccaccctggtggccctgctggccgctcggaccaaagtgatccatcggctgcaggcagcgtccccagagctcacacaggccgctatcatggagaagctggtggcttactcatccgatcaggcacactcctcagtggaaagagctgggttaattggtggagtgaaattaaaagccatcccctcagatggcaacttcgccatgcgtgcgtctgccctgcaggaagccctggagagagacaaagcggctggcctgattcctttctttatggttgccaccctggggaccacaacatgctgctcctttgacaatctcttagaagtcggtcctatctgcaacaaggaagacatatggctgcacgttgatgcagcctacgcaggcagtgcattcatctgccctgagttccggcaccttctgaatggagtggagtttgcagattcattcaactttaatccccacaaatggctattggtgaattttgactgttctgccatgtgggtgaaaaagagaacagacttaacgggagcctttagactggaccccacttacctgaagcacagccatcaggattcagggcttatcactgactaccggcattggcagataccactgggcagaagatttcgctctttgaaaatgtggtttgtatttaggatgtatggagtcaaaggactgcaggcttatatccgcaagcatgtccagctgtcccatgagtttgagtcactggtgcgccaggatccccgctttgaaatctgtgtggaagtcattctggggcttgtctgctttcggctaaagggttccaacaaagtgaatgaagctcttctgcaaagaataaacagtgccaaaaaaatccacttggttccatgtcacctcagggacaagtttgtcctgcgctttgccatctgttctcgcacggtggaatctgcccatgtgcagcgggcctgggaacacatcaaagagctggcggccgacgtgctgcgagcagagagggagtaggagtgaagccagctgcaggaatcaaaaattgaagagagatatatctgaaaactggaataagaagcaaataaatatcatcctgccttcatggaactcagctgtctgtggcttcccatgtctttctccaaagttatccagagggttgtgattttgtctgcttagtatctcatcaacaaagaaatattatttgctaattaaaaagttaatcttcatggccatagcttttattcattagctgtgatttttgttgattaaaacattatagattttcatgttcttgcagtcatcagaagtggtaggaaagcctcactgatatattttccagggcaatcaatgttcacgcaacttgaaattatatctgtggtcttcaaattgtcttttgtcatgtggctaaatgcctaataagctgctcgagagatctacgggtggcatccctgtgacccctccccagtgcctctcctggccctggaagttgccactccagtgcccaccagccttgtcctaataaaattaagttgcatcattttgtctgactaggtgtccttctataatattatggggtggaggggggtggtatggagcaaggggcaagttgggaagacaacctgtagggcctgcggggtctattgggaaccaagctggagtgcagtggcacaatcttggctcactgcaatctccgcctcctgggttcaagcgattctcctgcctcagcctcccgagttgttgggattccaggcatgcatgaccaggctcagctaatttttgtttttttggtagagacggggtttcaccatattggccaggctggtctccaactcctaatctcaggtgatctacccaccttggcctcccaaattgctgggattacaggcgtgaaccactgctcccttccctgtccttctgattttgtaggtaaccgtaaccccggaccacgtgcggaccgagcggccgctctagagcatggctacgtagataagtagcatggcgggttaatcattaactacaaggaacccctagtgatggagttggccactccctctctgcgcgctcgctcgctcactgaggccgggcgaccaaaggtcgcccgacgcccgggcggcctcagtgagcgagcgagcgcgcagctgcctgcaggtctgagacaataaccctgataaatgcttcaataatgtagccaaccactagaactatagctagagtcctgggcgaacaaacgatgctcgccttccagaaaaccgaggatgcgaaccacttcatccggggtcagcaccaccggcaagcgccgcgacggccgaggtcttccgatctcctgaagccagggcagatccgtgcacagcaccttgccgtagaagaacagcaaggccgccaatgcctgacgatgcgtggagaccgaaaccttgcgctcgttcgccagccaggacagaaatgcctcgacttcgctgctgcccaaggttgccgggtgacgcacaccgtggaaacggatgaaggcacgaacccagttgacataagcctgttcggttcgtaaactgtaatgcaagtagcgtatgcgctcacgcaactggtccagaaccttgaccgaacgcagcggtggtaacggcgcagtggcggttttcatggcttgttatgactgtttttttgtacagtctatgcctcgggcatccaagcagcaagcgcgttacgccgtgggtcgatgtttgatgttatggagcagcaacgatgttacgcagcagcaacgatgttacgcagcagggcagtcgccctaaaacaaagttaggtggctcaagtatgggcatcattcgcacatgtaggctcggccctgaccaagtcaaatccatgcgggctgctcttgatcttttcggtcgtgagttcggagacgtagccacctactcccaacatcagccggactccgattacctcgggaacttgctccgtagtaagacattcatcgcgcttgctgccttcgaccaagaagcggttgttggcgctctcgcggcttacgttctgcccaagtttgagcagccgcgtagtgagatctatatctatgatctcgcagtctccggcgagcaccggaggcagggcattgccaccgcgctcatcaatctcctcaagcatgaggccaacgcgcttggtgcttatgtgatctacgtgcaagcagattacggtgacgatcccgcagtggctctctatacaaagttgggcatacgggaagaagtgatgcactttgatatcgacccaagtaccgccacctaacaattcgttcaagccgagatcggcttcccggccgcggagttgttcggtaaattgtcacaacgccgcgaatatagtctttaccatgcccttggccacgcccctctttaatacgacgggcaatttgcacttcagaaaatgaagagtttgctttagccataacaaaagtccagtatgctttttcacagcataactggactgatttcagtttacaactattctgtctagtttaagactttattgtcatagtttagatctattttgttcagtttaagactttattgtccgcccacacccgcttacgcagggcatccatttattactcaaccgtaaccgattttgccaggttacgcggctggtctatgcggtgtgaaataccgcacagatgcgtaaggagaaaataccgcatcaggcgctcttccgcttcctcgctcactgactcgctgcgctcggtcgttcggctgcggcgagcggtatcagctcactcaaaggcggtaatacggttatccacagaatcaggggataacgcaggaaagaacatgtgagcaaaaggccagcaaaaggccaggaaccgtaaaaaggccgcgttgctggcgtttttccataggctccgcccccctgacgagcatcacaaaaatcgacgctcaagtcagaggtggcgaaacccgacaggactataaagataccaggcgtttccccctggaagctccctcgtgcgctctcctgttccgaccctgccgcttaccggatacctgtccgcctttctcccttcgggaagcgtggcgctttctcatagctcacgctgtaggtatctcagttcggtgtaggtcgttcgctccaagctgggctgtgtgcacgaaccccccgttcagcccgaccgctgcgccttatccggtaactatcgtcttgagtccaacccggtaagacacgacttatcgccactggcagcagccactggtaacaggattagcagagcgaggtatgtaggcggtgctacagagttcttgaagtggtggcctaactacggctacactagaagaacagtatttggtatctgcgctctgctgaagccagttaccttcggaaaaagagttggtagctcttgatccggcaaacaaaccaccgctggtagcggtggtttttttgtttgcaagcagcagattacgcgcagaaaaaaaggatctcaagaagatcctttgatcttttctacggggtctgacgctcagtggaacgaaaactcacgttaagggattttggtcatgagattatcaaaaaggatcttcacctagatccttttaaattaaaaatgaagttttaaatcaatctaaagtatatatgagtaaacttggtctgacagttaccaatgcttaatcagtgaggcacctatctcagcgatctgtctatttcgttcatccatagttgcctgactccccgtcgtgtagataactacgatacgggagggcttaccatctggccccagtgctgcaatgataccgcgagacccacgctcaccggctccagatttatcagcaataaaccagccagccggaagggccgagcgcagaagtggtcctgcaactttatccgcctccatccagtctattaattgttgccgggaagctagagtaagtagttcgccagttaatagtttgcgcaacgttgttgccattgctacaggcatcgtggtgtcacgctcgtcgtttggtatggcttcattcagctccggttcccaacgatcaaggcgagttacatgatcccccatgttgtgcaaaaaagcggttagctccttcggtcctccgatcgttgtcagaagtaagttggccgcagtgttatcactcatggttatggcagcactgcataattctcttactgtcatgccatccgtaagatgcttttctgtgactggtgagtactcaaccaagtcattctgagaatagtgtatgcggcgaccgagttgctcttgcccggcgtcaatacgggataataccgcgccacatagcagaactttaaaagtgctcatcattggaaaacgttcttcggggcgaaaactctcaaggatcttaccgctgttgagatccagttcgatgtaacccactcgtgcacccaactgatcttcagcatcttttactttcaccagcgtttctgggtgagcaaaaacaggaaggcaaaatgccgcaaaaaagggaataagggcgacacggaaatgttgaatactcatactcttcctttttcaatattattgaagcatttatcagggttattgtctcatgagcggatacatatttgaatgtatttagaaaaataaacaaataggggttccgcgcacatttccccgaaaagtgccacctaaattgtaagcgttaatattttgttaaaattcgcgttaaatttttgttaaatcagctcattttttaaccaataggccgaaatcggcaaaatcccttataaatcaaaagaatagaccgagatagggttgagtgttgttccagtttggaacaagagtccactattaaagaacgtggactccaacgtcaaagggcgaaaaaccgtctatcagggcgatggcccactacgtgaaccatcaccctaatcaagttttttggggtcgaggtgccgtaaagcactaaatcggaaccctaaagggagcccccgatttagagcttgacggggaaagccggcgaacgtggcgagaaaggaagggaagaaagcgaaaggagcgggcgctagggcgctggcaagtgtagcggtcacgctgcgcgtaaccaccacacccgccgcgcttaatgcgccgctacagggcgcgtc

SEQ ID NO: 5 - DNA, 8694 bp, Artificial Sequence
  Description of Artificial Sequence: Synthetic polynucleotide
cattcgccattcaggctgcaaataagcgttgatattcagtcaattacaaacattaataacgaagagatgacagaaaaattttcattctgtgacagagaaaaagtagccgaagatgacggtttgtcacatggagttggcaggatgtttgattaaaaacataacaggaagaaaaatgccccgctgtgggcggacaaaatagttgggaactgggaggggtggaaatggagtttttaaggattatttagggaagagtgacaaaatagatgggaactgggtgtagcgtcgtaagctaatacgaaaattaaaaatgacaaaatagtttggaactagatttcacttatctggttcggatctcctaggcgatatcagtgatcagatccagacatgataagatacattgatgagtttggacaaaccacaactagaatgcagtgaaaaaaatgctttatttgtgaaatttgtgatgctattgctttatttgtaaccattataagctgcaataaacaagttaacaacaacaattgcattcattttatgtttcaggttcagggggaggtgtgggaggttttttaaagcaagtaaaacctctacaaatgtggtatggctgattatgatcctctagtacttctcgacaagcttacattattgaagcatttatcagggttattgtctcagacctgcaggcagctgcgcgctcgctcgctcactgaggccgcccgggcaaagcccgggcgtcgggcgacctttggtcgcccggcctcagtgagcgagcgagcgcgcagagagggagtggccaactccatcactaggggttccttgtagttaatgattaacccgccatgctacttatctacgtagccatgctctagagcggccgcaacgcgtaaacttcgtcgacgatctgcggccgcacgcgtggagctagttattaatagtaatcaattacggggtcattagttcatagcccatatatggagttccgcgttacataacttacggtaaatggcccgcctggctgaccgcccaacgacccccgcccattgacgtcaataatgacgtatgttcccatagtaacgtcaatagggactttccattgacgtcaatgggtggagtatttacggtaaactgcccacttggcagtacatcaagtgtatcatatgccaagtacgccccctattgacgtcaatgacggtaaatggcccgcctggcattatgcccagtacatgaccttatgggactttcctacttggcagtacatctacgtattagtcatcgctattaccatggtgatgcggttttggcagtacatcaatgggcgtggatagcggtttgactcacggggatttccaagtctccaccccattgacgtcaatgggagtttgttttgcaccaaaatcaacgggactttccaaaatgtcgtaacaactccgccccattgacgcaaatgggcggtaggcgtgtacggtgggaggtctatataagcagagctcgtttagtgaaccgtcagatcgcctggagacgccatccacgctgttttgacctccatagaagacaccgggaccgatccagcctccgcggattcgaatcccggccgggaacggtgcattggaacgcggattccccgtgccaagagtgacgtaagtaccgcctatagagtctataggcccacaaaaaatgctttcttcttttaatatacttttttgtttatcttatttctaatactttccctaatctctttctttcagggcaataatgatacaatgtatcatgcctctttgcaccattctaaagaataacagtgataatttctgggttaaggcaatagcaatatttctgcatataaatatttctgcatataaattgtaactgatgtaagaggtttcatattgctaatagcagctacaatccagctaccattctgcttttattttatggttgggataaggctggattattctgagtccaagctaggcccttttgctaatcatgttcatacctcttatcttcctcccacagctcctgggcaacgtgctggtctgtgtgctggcccatcactttggcaaagaattgggattcgaacatcgaattcgggcacgagggaggacagagagcaagtcactcccggctgcctttttcacctctgacagagcccagacaccatgaacgcaagtgaattccgaaggagagggaaggagatggtggattacgtggccaactacatggaaggcattgagggacgccaggtctaccctgacgtggagcccgggtacctgcggccgctgatccctgccgctgcccctcaggagccagacacgtttgaggacatcatcaacgacgttgagaagataatcatgcctggggtgacgcactggcacagcccctacttcttcgcctacttccccactgccagctcgtacccggccatgcttgcggacatgctgtgcggggccattggctgcatcggcttctcctgggcggcaagcccagcatgcacagagctggagactgtgatgatggactggctcgggaagatgctggaactaccaaaggcatttttgaatgagaaagctggagaagggggaggagtgatccagggaagtgccagtgaagccaccctggtggccctgctggccgctcggaccaaagtgatccatcggctgcaggcagcgtccccagagctcacacaggccgctatcatggagaagctggtggcttactcatccgatcaggcacactcctcagtggaaagagctgggttaattggtggagtgaaattaaaagccatcccctcagatggcaacttcgccatgcgtgcgtctgccctgcaggaagccctggagagagacaaagcggctggcctgattcctttctttatggttgccaccctggggaccacaacatgctgctcctttgacaatctcttagaagtcggtcctatctgcaacaaggaagacatatggctgcacgttgatgcagcctacgcaggcagtgcattcatctgccctgagttccggcaccttctgaatggagtggagtttgcagattcattcaactttaatccccacaaatggctattggtgaattttgactgttctgccatgtgggtgaaaaagagaacagacttaacgggagcctttagactggaccccacttacctgaagcacagccatcaggattcagggcttatcactgactaccggcattggcagataccactgggcagaagatttcgctctttgaaaatgtggtttgtatttaggatgtatggagtcaaaggactgcaggcttatatccgcaagcatgtccagctgtcccatgagtttgagtcactggtgcgccaggatccccgctttgaaatctgtgtggaagtcattctggggcttgtctgctttcggctaaagggttccaacaaagtgaatgaagctcttctgcaaagaataaacagtgccaaaaaaatccacttggttccatgtcacctcagggacaagtttgtcctgcgctttgccatctgttctcgcacggtggaatctgcccatgtgcagcgggcctgggaacacatcaaagagctggcggccgacgtgctgcgagcagagagggagtaggagtgaagccagctgcaggaatcaaaaattgaagagagatatatctgaaaactggaataagaagcaaataaatatcatcctgccttcatggaactcagctgtctgtggcttcccatgtctttctccaaagttatccagagggttgtgattttgtctgcttagtatctcatcaacaaagaaatattatttgctaattaaaaagttaatcttcatggccatagcttttattcattagctgtgatttttgttgattaaaacattatagattttcatgttcttgcagtcatcagaagtggtaggaaagcctcactgatatattttccagggcaatcaatgttcacgcaacttgaaattatatctgtggtcttcaaattgtcttttgtcatgtggctaaatgcctaataaacaattcaagtgaaatactaaaaaaaaaaaaaaaaaaaaaagctgctcgagagatctacgggtggcatccctgtgacccctccccagtgcctctcctggccctggaagttgccactccagtgcccaccagccttgtcctaataaaattaagttgcatcattttgtctgactaggtgtccttctataatattatggggtggaggggggtggtatggagcaaggggcaagttgggaagacaacctgtagggcctgcggggtctattgggaaccaagctggagtgcagtggcacaatcttggctcactgcaatctccgcctcctgggttcaagcgattctcctgcctcagcctcccgagttgttgggattccaggcatgcatgaccaggctcagctaatttttgtttttttggtagagacggggtttcaccatattggccaggctggtctccaactcctaatctcaggtgatctacccaccttggcctcccaaattgctgggattacaggcgtgaaccactgctcccttccctgtccttctgattttgtaggtaacgtaaccccggaccacgtgcggaccgagcggccgctctagagcatggctacgtagataagtagcatggcgggttaatcattaactacaaggaacccctagtgatggagttggccactccctctctgcgcgctcgctcgctcactgaggccgggcgaccaaaggtcgcccgacgcccgggcggcctcagtgagcgagcgagcgcgcagctgcctgcaggtctgagacaataaccctgataaatgcttcaataatgtagccaaccactagaactatagctagagtcctgggcgaacaaacgatgctcgccttccagaaaaccgaggatgcgaaccacttcatccggggtcagcaccaccggcaagcgccgcgacggccgaggtcttccgatctcctgaagccagggcagatccgtgcacagcaccttgccgtagaagaacagcaaggccgccaatgcctgacgatgcgtggagaccgaaaccttgcgctcgttcgccagccaggacagaaatgcctcgacttcgctgctgcccaaggttgccgggtgacgcacaccgtggaaacggatgaaggcacgaacccagttgacataagcctgttcggttcgtaaactgtaatgcaagtagcgtatgcgctcacgcaactggtccagaaccttgaccgaacgcagcggtggtaacggcgcagtggcggttttcatggcttgttatgactgtttttttgtacagtctatgcctcgggcatccaagcagcaagcgcgttacgccgtgggtcgatgtttgatgttatggagcagcaacgatgttacgcagcagcaacgatgttacgcagcagggcagtcgccctaaaacaaagttaggtggctcaagtatgggcatcattcgcacatgtaggctcggccctgaccaagtcaaatccatgcgggctgctcttgatcttttcggtcgtgagttcggagacgtagccacctactcccaacatcagccggactccgattacctcgggaacttgctccgtagtaagacattcatcgcgcttgctgccttcgaccaagaagcggttgttggcgctctcgcggcttacgttctgcccaagtttgagcagccgcgtagtgagatctatatctatgatctcgcagtctccggcgagcaccggaggcagggcattgccaccgcgctcatcaatctcctcaagcatgaggccaacgcgcttggtgcttatgtgatctacgtgcaagcagattacggtgacgatcccgcagtggctctctatacaaagttgggcatacgggaagaagtgatgcactttgatatcgacccaagtaccgccacctaacaattcgttcaagccgagatcggcttcccggccgcggagttgttcggtaaattgtcacaacgccgcgaatatagtctttaccatgcccttggccacgcccctctttaatacgacgggcaatttgcacttcagaaaatgaagagtttgctttagccataacaaaagtccagtatgctttttcacagcataactggactgatttcagtttacaactattctgtctagtttaagactttattgtcatagtttagatctattttgttcagtttaagactttattgtccgcccacacccgcttacgcagggcatccatttattactcaaccgtaaccgattttgccaggttacgcggctggtctatgcggtgtgaaataccgcacagatgcgtaaggagaaaataccgcatcaggcgctcttccgcttcctcgctcactgactcgctgcgctcggtcgttcggctgcggcgagcggtatcagctcactcaaaggcggtaatacggttatccacagaatcaggggataacgcaggaaagaacatgtgagcaaaaggccagcaaaaggccaggaaccgtaaaaaggccgcgttgctggcgtttttccataggctccgcccccctgacgagcatcacaaaaatcgacgctcaagtcagaggtggcgaaacccgacaggactataaagataccaggcgtttccccctggaagctccctcgtgcgctctcctgttccgaccctgccgcttaccggatacctgtccgcctttctcccttcgggaagcgtggcgctttctcatagctcacgctgtaggtatctcagttcggtgtaggtcgttcgctccaagctgggctgtgtgcacgaaccccccgttcagcccgaccgctgcgccttatccggtaactatcgtcttgagtccaacccggtaagacacgacttatcgccactggcagcagccactggtaacaggattagcagagcgaggtatgtaggcggtgctacagagttcttgaagtggtggcctaactacggctacactagaagaacagtatttggtatctgcgctctgctgaagccagttaccttcggaaaaagagttggtagctcttgatccggcaaacaaaccaccgctggtagcggtggtttttttgtttgcaagcagcagattacgcgcagaaaaaaaggatctcaagaagatcctttgatcttttctacggggtctgacgctcagtggaacgaaaactcacgttaagggattttggtcatgagattatcaaaaaggatcttcacctagatccttttaaattaaaaatgaagttttaaatcaatctaaagtatatatgagtaaacttggtctgacagttaccaatgcttaatcagtgaggcacctatctcagcgatctgtctatttcgttcatccatagttgcctgactccccgtcgtgtagataactacgatacgggagggcttaccatctggccccagtgctgcaatgataccgcgagacccacgctcaccggctccagatttatcagcaataaaccagccagccggaagggccgagcgcagaagtggtcctgcaactttatccgcctccatccagtctattaattgttgccgggaagctagagtaagtagttcgccagttaatagtttgcgcaacgttgttgccattgctacaggcatcgtggtgtcacgctcgtcgtttggtatggcttcattcagctccggttcccaacgatcaaggcgagttacatgatcccccatgttgtgcaaaaaagcggttagctccttcggtcctccgatcgttgtcagaagtaagttggccgcagtgttatcactcatggttatggcagcactgcataattctcttactgtcatgccatccgtaagatgcttttctgtgactggtgagtactcaaccaagtcattctgagaatagtgtatgcggcgaccgagttgctcttgcccggcgtcaatacgggataataccgcgccacatagcagaactttaaaagtgctcatcattggaaaacgttcttcggggcgaaaactctcaaggatcttaccgctgttgagatccagttcgatgtaacccactcgtgcacccaactgatcttcagcatcttttactttcaccagcgtttctgggtgagcaaaaacaggaaggcaaaatgccgcaaaaaagggaataagggcgacacggaaatgttgaatactcatactcttcctttttcaatattattgaagcatttatcagggttattgtctcatgagcggatacatatttgaatgtatttagaaaaataaacaaataggggttccgcgcacatttccccgaaaagtgccacctaaattgtaagcgttaatattttgttaaaattcgcgttaaatttttgttaaatcagctcattttttaaccaataggccgaaatcggcaaaatcccttataaatcaaaagaatagaccgagatagggttgagtgttgttccagtttggaacaagagtccactattaaagaacgtggactccaacgtcaaagggcgaaaaaccgtctatcagggcgatggcccactacgtgaaccatcaccctaatcaagttttttggggtcgaggtgccgtaaagcactaaatcggaaccctaaagggagcccccgatttagagcttgacggggaaagccggcgaacgtggcgagaaaggaagggaagaaagcgaaaggagcgggcgctagggcgctggcaagtgtagcggtcacgctgcgcgtaaccaccacacccgccgcgcttaatgcgccgctacagggcgcgtc

SEQ ID NO: 6 - DNA, 9266 bp, Artificial Sequence
  Description of Artificial Sequence: Synthetic polynucleotide
gagaggcggtttgcgtattgggcgctcttccgcttcctcgctcactgactcgctgcgctcggtcgttcggctgcggcgagcggtatcagctcactcaaaggcggtaatacggttatccacagaatcaggggataacgcaggaaagaacatgtgagcaaaaggccagcaaaaggccaggaaccgtaaaaaggccgcgttgctggcgttttgagatcctttttttctgcgcgtaatctgctgcttgcaaacaaaaaaaccaccgctaccagcggtggtttgtttgccggatcaagagctaccaactctttttccgaaggtaactggcttcagcagagcgcagataccaaatactgttcttctagtgtagccgtagttaggccaccacttcaagaactctgtagcaccgcctacatacctcgctctgctaatcctgttaccagtggctgctgccagtggcgataagtcgtgtcttaccgggttggactcaagacgatagttaccggataaggcgcagcggtcgggctgaacggggggttcgtgcacacagcccagcttggagcgaacgacctacaccgaactgagatacctacagcgtgagctatgagaaagcgccacgcttcccgaagggagaaaggcggacaggtatccggtaagcggcagggtcggaacaggagagcgcacgagggagcttccagggggaaacgcctggtatctttatagtcctgtcgggtttcgccacctctgacttgagcgtcgatttttgtgatgctcgtcaggggggcggagcctatggaaagaagatcctttgatcttttctacggggtctgacgctcagtggaacgaaaactcacgttaagggattttggtcatgagattatcaaaaaggatcttcacctagatccttttaaattaaaaatgaagttttaaatcaagcccaatctgaataatgttacaaccaattaaccaattctgaaaacgcgcgatgcagctctggcccgtgtctcaaaatctctgatgttacattgcacaagataaaaatatatcatcatgaacaataaaactgtctgcttacataaacagtaatacaaggggtgttatgagccatattcaacgggaaacgtcgaggccgcgattaaattccaacatggatgctgatttatatgggtataaatgggctcgcgataatgtcgggcaatcaggtgcgacaatctatcgcttgtatgggaagcccgatgcgccagagttgtttctgaaacatggcaaaggtagcgttgccaatgatgttacagatgagatggtcagactaaactggctgacggaatttatgcctcttccgaccatcaagcattttatccgtactcctgatgatgcatggttactcaccactgcgatccccggaaaaacagcattccaggtattagaagaatatcctgattcaggtgaaaatattgttgatgcgctggcagtgttcctgcgccggttgcattcgattcctgtttgtaattgtccttttaacagcgatcgcgtatttcgtctcgctcaggcgcaatcacgaatgaataacggtttggttgatgcgagtgattttgatgacgagcgtaatggctggcctgttgaacaagtctggaaagaaatgcataaacttttgccattctcaccggattcagtcgtcactcatggtgatttctcacttgataaccttatttttgacgaggggaaattaataggttgtattgatgttggacgagtcggaatcgcagaccgataccaggatcttgccatcctatggaactgcctcggtgagttttctccttcattacagaaacggctttttcaaaaatatggtattgataatcctgatatgaataaattgcagtttcatttgatgctcgatgagtttttctaatcagaattggttaattggttgtaacattattcagattgggcttgatttaaaacttcatttttaatttaaaaggatctaggtgaagatcctttttgataatctcatgaccaaaatcccttaacgtgagttttcgttccactgagcgtcagaccccgtagaaaagatcaaaggatcttcaacaccccttgtattactgtttatgtaagcagacagttttattgttcatgatgatatatttttatcttgtgcaatgtaacatcagagattttgagacacgggccagagctgcatcgcgcgtttcggtgatgacggtgaaaacctctgacacatgcagctcccgtatctggaggctataaatgattacgatacttcgaaaacatccttatcctggaaaactccccgttcatttcccactctcctgccattcgacactcgtgcgtccattcaagtctgtgctaatttctacgcatttccctctgccattgactttgcttgcgtgggataataactattaagccaacttgattcaactcaggcattcaaaaggcattttgattagtcgaaaagtggcacggctgacgagtggagctgccatttcacgtttatttcgaacttttgattacatggtatatttagtaatacacatattttttagccagcaggttaatacttcaaagttgtttcgattttcaacgaataaaaggaatttggcatggtgttttttctggtctttggtattgacaaatcagggatatacaatatgtattaacaaaattggattgctacatatatttaatgattttcattattagaatgggtggaataaagttttaaattacattattaatttcattagggttggctgattgattactatttcctcattgaattgcattcgatattagcagtatttatctggcccattttggaagttacttaaatttcgaaccttaagtcattattagagctaatatacaacagagttgtcaacttggtttgatcagcattgaaattaaactgatttcttgttcgttcttatttcgtttggttttgtatctcgtattttatatgcaggagggcatatattggcacaagacaaataatcacagcacccattctcaactttgtcctgtttctcagtttagtgtaaatagaatgttgcaaaaaattgaatataagcattatcatagtgtcaaattcgagaggatgagtttgctgtgggtcttcgaggttctttccctgtgtttgccacggttcgttgcacgttgccactgattggacacatgtccgcagtgaaaaatctacggtcaggtaccacccaactaaaccggaaggcggcacgtgtgtgggcgttgagcggtgtgggcgtggcagccatataatgagacatttatttaaaaagaacattcgaacatttttgatgggccatatcttggcttgtcaagctccagggcagacattttcctcgactccaccgcctttttcatttgaatggaggaggtgtagggcacaaaaaacgtttcctgcctttttaagcagcacaaaggatatgagccattaaattagttaatttcgagtgcatttcattttaaataagtgttggaaagggaataaaaaagcgactgatagaaaagttgcagacaccaagagaatgttaaatattttaataatagctacatttttctatctctgtgacaaggcctgtgtactttaatgttatattacttctttgtgtttgatttctgttaaaagtttatgattttggcatgtacaaatcttacaacccttttttgtcatcatgacaaaatcaaaatcgtgcaatatttccattctcatcttttagccgattcataacattcgtagaaattaatatgaaatcaatcatgtataattttcatgcacgttatgccgatttggtatcgtcgatttgccggctcatcgtcgccattgtgttaatggaaaagttatgcttttcgcaggaaaaaagagttgaaaattccaatttttgtcatgctcatcaaaatgttatacattcggtaatttgagctggccaaacgttaaccccttatcgccccgcgcaagcattcattaactgcccccagagcgtaattaatctctttctcgcagaatttccttcacagccacgtcttgggtaaaagtcacccctcaaagtggcagttgcatgttgtaaattagattttcgtccgtcatgacaaccctcgtgcgagggttgctgcagcatttgaatgcaaaactgcttttggtcattaacctgtctgaggcactttgctgcaaaacttctattagaattcggtttggactcgaattcggatttcttcccccaaaatgcgatggctacagcaaaatgctttcagcttccgaagttttgcaaccccaaagtccagagtttccacgctgtcacgattccaaagcggcgccatttttggctcacgcaaaacttattaatgaactttaagcagactacgaggaaagggctataatggccacacaaaagggttaagcaagtgttaagggctggtgggagggaaaaatcatcaatcatattttctgcatagctgaatcatttgcgccgatcagttggggttacttaatgggtttatttcaagaagaaaactgtgggaaactaactgactctaaacttaatcagattaaatgtaacctggagatgattttcaaaatattaaaagagttttatggaggtaattttaaagaaaactgaaaaactttgaagaagtctataatagatccagtcttaatcgtagcactgattatttgtttttaaattggaaaaaattaaatgatacatcatgcttaaatgcgatgtccaacaaatcccaagacggtaatttccgtgcgttccaaactcatctgaagaatcttacaaatacatttcgtgtatccccaggctcagcgtgcaaataaatcttttggatctttgcaaatgcgaaatgcttatttttatgcgttttcaatgccaattcgatggcaaaaccaacaaaatcacatggaaataatggaaaagcaatttccatttctacaagggaggcagtgagacacaagagcagcgtatacaattccccagcagcgatttgaccattaaaattatacccacaggacgagcaggcataaaaagcagaggatgcgaggtgttcaggggactgtctatatctccaacttgaatatatgaaatcgtttggaaatagccaagcgaccaaattggcatttggaaaattgcacaacgacagaagaagatgtttgaaaagagaaattgaaataataaaccaagatatatgtaaacggttggtcacatttgggttctgagacggtcacagcttgtctgtaagcggatgccgggagcagacaagcccgtcagggcgcgtcagcgggtgttggcgggtgtcggggctggcttaactatgcggcatcagagcagattgtactgagagtgcaccatatgcggtgtgaaataccgcacagatgcgtaaggagaaaataccgcatcaggcgccattcgccattcaggctgcgcaactgttgggaagggcgatcggtgcgggcctcttcgctattacgccagctggcgaaagggggatgtgctgcaaggcgattaagttgggtaacgccagggttttcccagtcacgacgttgtaaaacgacggccagtgaattcgagctcggtaccatttaaatcgtcttggccactccctctctgcgcgctcgctcgctcactgaggccgcccgggcaaagcccgggcgtcgggcgacctttggtcgcccggcctcagtgagcgagcgagcgcgcagagagggagtggccaactccatcactaggggttccttcgcgagcttaattaactgcggccgctcggtccgcacgtggttacctacaaaatcagaaggacagggaagggagcagtggttcacgcctgtaatcccagcaatttgggaggccaaggtgggtagatcacctgagattaggagttggagaccagcctggccaatatggtgaaaccccgtctctaccaaaaaaacaaaaattagctgagcctggtcatgcatgcctggaatcccaacaactcgggaggctgaggcaggagaatcgcttgaacccaggaggcggagattgcagtgagccaagattgtgccactgcactccagcttggttcccaatagaccccgcaggccctacaggttgtcttcccaacttgccccttgctccataccacccccctccaccccataatattatagaaggacacctagtcagacaaaatgatgcaacttaattttattaggacaaggctggtgggcactggagtggcaacttccagggccaggagaggcactggggaggggtcacagggatgccacccgtagatctctcgagcagctcactcctactccctctctgctcgcagcacgtcggccgccagctctttgatgtgttcccaggcccgctgcacatgggcagattccaccgtgcgagaacagatggcaaagcgcaggacaaacttgtccctgaggtgacatggaaccaagtggatttttttggcactgtttattctttgcagaagagcttcattcactttgttggaaccctttagccgaaagcagacaagccccagaatgacttccacacagatttcaaagcggggatcctggcgcaccagtgactcaaactcatgggacagctggacatgcttgcggatataagcctgcagtcctttgactccatacatcctaaatacaaaccacattttcaaagagcgaaatcttctgcccagtggtatctgccaatgccggtagtcagtgataagccctgaatcctgatggctgtgcttcaggtaagtggggtccagtctaaaggctcccgttaagtctgttctctttttcacccacatggcagaacagtcaaaattcaccaatagccatttgtggggattaaagttgaatgaatctgcaaactccactccattcagaaggtgccggaactcagggcagatgaatgcactgcctgcgtaggctgcatcaacgtgcagccatatgtcttccttgttgcagataggaccgacttctaagagattgtcaaaggagcagcatgttgtggtccccagggtggcaaccataaagaaaggaatcaggccagccgctttgtctctctccagggcttcctgcagggcagacgcacgcatggcgaagttgccatctgaggggatggcttttaatttcactccaccaattaacccagctctttccactgaggagtgtgcctgatcggatgagtaagccaccagcttctccatgatagcggcctgtgtgagctctggggacgctgcctgcagccgatggatcactttggtccgagcggccagcagggccaccagggtggcttcactggcacttccctggatcactcctcccccttctccagctttctcattcaaaaatgcctttggtagttccagcatcttcccgagccagtccatcatcacagtctccagctctgtgcatgctgggcttgccgcccaggagaagccgatgcagccaatggccccgcacagcatgtccgcaagcatggccgggtacgagctggcagtggggaagtaggcgaagaagtaggggctgtgccagtgcgtcaccccaggcatgattatcttctcaacgtcgttgatgatgtcctcaaacgtgtctggctcctgaggggcagcggcagggatcagcggccgcaggtacccgggctccacgtcagggtagacctggcgtccctcaatgccttccatgtagttggccacgtaatccaccatctccttccctctccttcggaattcacttgcgttcatggtggcggccgatgttcgaatcccaattctttgccaaagtgatgggccagcacacagaccagcacgttgcccaggagctgtgggaggaagataagaggtatgaacatgattagcaaaagggcctagcttggactcagaataatccagccttatcccaaccataaaataaaagcagaatggtagctggattgtagctgctattagcaatatgaaacctcttacatcagttacaatttatatgcagaaatatttatatgcagaaatattgctattgccttaacccagaaattatcactgttattctttagaatggtgcaaagaggcatgatacattgtatcattattgccctgaaagaaagagattagggaaagtattagaaataagataaacaaaaaagtatattaaaagaagaaagcattttttgtgggcctatagactctataggcggtacttacgtcactcttggcacggggaatccgcgttccaatgcaccgttcccggccgggattcgaatccgcggaggctggatcggtcccggtgtcttctatggaggtcaaaacagcgtggatggcgtctccaggcgatctgacggttcactaaacgagctctgcttatatagacctcccaccgtacacgcctaccgcccatttgcgtcaatggggcggagttgttacgacattttggaaagtcccgttgattttggtgcaaaacaaactcccattgacgtcaatggggtggagacttggaaatccccgtgagtcaaaccgctatccacgcccattgatgtactgccaaaaccgcatcaccatggtaatagcgatgactaatacgtagatgtactgccaagtaggaaagtcccataaggtcatgtactgggcataatgccaggcgggccatttaccgtcattgacgtcaatagggggcgtacttggcatatgatacacttgatgtactgccaagtgggcagtttaccgtaaatactccacccattgacgtcaatggaaagtccctattgacgttactatgggaacatacgtcattattgacgtcaatgggcgggggtcgttgggcggtcagccaggcgggccatttaccgtaagttatgtaacgcggaactccatatatgggctatgaactaatgaccccgtaattgattactattaataactagctccacgcgtgcggccgcagatcgtcgacgaagtttaaactcaggaacccctagtgatggagttggccactccctctctgcgcgctcgctcgctcactgaggccgcccgggcaaagcccgggcgtcgggcgacctttggtcgcccggcctcagtgagcgagcgagcgcgcagagagggagtggccaacgtcatttaaatgcatgcaagcttggcgtaatcatggtcatagctgtttcctgtgtgaaaattgcgttgcgctcactgcccgctttccagtcgggaaacctgtcgtgccagctgcattaatgaatcggccaacgcgcggg

SEQ ID NO: 7 - DNA, 9236 bp, Artificial Sequence
  Description of Artificial Sequence: Synthetic polynucleotide
cccgcgcgttggccgattcattaatgcagctggcacgacaggtttcccgactggaaagcgggcagtgagcgcaacgcaattttcacacaggaaacagctatgaccatgattacgccaagcttgcatgcatttaaatgacgcagctgcgcgctcgctcgctcactgaggccgcccgggcaaagcccgggcgtcgggcgacctttggtcgcccggcctcagtgagcgagcgagcgcgcagagagggagtggccaactccatcactaggggttgagtttaaacttcgtcgacgatctgcggccgcacgcgtggagctagttattaatagtaatcaattacggggtcattagttcatagcccatatatggagttccgcgttacataacttacggtaaatggcccgcctggctgaccgcccaacgacccccgcccattgacgtcaataatgacgtatgttcccatagtaacgtcaatagggactttccattgacgtcaatgggtggagtatttacggtaaactgcccacttggcagtacatcaagtgtatcatatgccaagtacgccccctattgacgtcaatgacggtaaatggcccgcctggcattatgcccagtacatgaccttatgggactttcctacttggcagtacatctacgtattagtcatcgctattaccatggtgatgcggttttggcagtacatcaatgggcgtggatagcggtttgactcacggggatttccaagtctccaccccattgacgtcaatgggagtttgttttgcaccaaaatcaacgggactttccaaaatgtcgtaacaactccgccccattgacgcaaatgggcggtaggcgtgtacggtgggaggtctatataagcagagctcgtttagtgaaccgtcagatcgcctggagacgccatccacgctgttttgacctccatagaagacaccgggaccgatccagcctccgcggattcgaatcccggccgggaacggtgcattggaacgcggattccccgtgccaagagtgacgtaagtaccgcctatagagtctataggcccacaaaaaatgctttcttcttttaatatacttttttgtttatcttatttctaatactttccctaatctctttctttcagggcaataatgatacaatgtatcatgcctctttgcaccattctaaagaataacagtgataatttctgggttaaggcaatagcaatatttctgcatataaatatttctgcatataaattgtaactgatgtaagaggtttcatattgctaatagcagctacaatccagctaccattctgcttttattttatggttgggataaggctggattattctgagtccaagctaggcccttttgctaatcatgttcatacctcttatcttcctcccacagctcctgggcaacgtgctggtctgtgtgctggcccatcactttggcaaagaattgggattcgaacatcggccgccaccatgaacgcaagtgaattccgaaggagagggaaggagatggtggattacgtggccaactacatggaaggcattgagggacgccaggtctaccctgacgtggagcccgggtacctgcggccgctgatccctgccgctgcccctcaggagccagacacgtttgaggacatcatcaacgacgttgagaagataatcatgcctggggtgacgcactggcacagcccctacttcttcgcctacttccccactgccagctcgtacccggccatgcttgcggacatgctgtgcggggccattggctgcatcggcttctcctgggcggcaagcccagcatgcacagagctggagactgtgatgatggactggctcgggaagatgctggaactaccaaaggcatttttgaatgagaaagctggagaagggggaggagtgatccagggaagtgccagtgaagccaccctggtggccctgctggccgctcggaccaaagtgatccatcggctgcaggcagcgtccccagagctcacacaggccgctatcatggagaagctggtggcttactcatccgatcaggcacactcctcagtggaaagagctgggttaattggtggagtgaaattaaaagccatcccctcagatggcaacttcgccatgcgtgcgtctgccctgcaggaagccctggagagagacaaagcggctggcctgattcctttctttatggttgccaccctggggaccacaacatgctgctcctttgacaatctcttagaagtcggtcctatctgcaacaaggaagacatatggctgcacgttgatgcagcctacgcaggcagtgcattcatctgccctgagttccggcaccttctgaatggagtggagtttgcagattcattcaactttaatccccacaaatggctattggtgaattttgactgttctgccatgtgggtgaaaaagagaacagacttaacgggagcctttagactggaccccacttacctgaagcacagccatcaggattcagggcttatcactgactaccggcattggcagataccactgggcagaagatttcgctctttgaaaatgtggtttgtatttaggatgtatggagtcaaaggactgcaggcttatatccgcaagcatgtccagctgtcccatgagtttgagtcactggtgcgccaggatccccgctttgaaatctgtgtggaagtcattctggggcttgtctgctttcggctaaagggttccaacaaagtgaatgaagctcttctgcaaagaataaacagtgccaaaaaaatccacttggttccatgtcacctcagggacaagtttgtcctgcgctttgccatctgttctcgcacggtggaatctgcccatgtgcagcgggcctgggaacacatcaaagagctggcggccgacgtgctgcgagcagagagggagtaggagtgagctgctcgagagatctacgggtggcatccctgtgacccctccccagtgcctctcctggccctggaagttgccactccagtgcccaccagccttgtcctaataaaattaagttgcatcattttgtctgactaggtgtccttctataatattatggggtggaggggggtggtatggagcaaggggcaagttgggaagacaacctgtagggcctgcggggtctattgggaaccaagctggagtgcagtggcacaatcttggctcactgcaatctccgcctcctgggttcaagcgattctcctgcctcagcctcccgagttgttgggattccaggcatgcatgaccaggctcagctaatttttgtttttttggtagagacggggtttcaccatattggccaggctggtctccaactcctaatctcaggtgatctacccaccttggcctcccaaattgctgggattacaggcgtgaaccactgctcccttccctgtccttctgattttgtaggtaaccacgtgcggaccgagcggccgcagttaattaagctcgcgaaacccctagtgatggagttggccactccctctctgcgcgctcgctcgctcactgaggccgggcgaccaaaggtcgcccgacgcccgggctttgcccgggcggcctcagtgagcgagcgagcgcgcagctggacgatttaaatggtaccgagctcgaattcactggccgtcgttttacaacgtcgtgactgggaaaaccctggcgttacccaacttaatcgccttgcagcacatccccctttcgccagctggcgtaatagcgaagaggcccgcaccgatcgcccttcccaacagttgcgcagcctgaatggcgaatggcgcctgatgcggtattttctccttacgcatctgtgcggtatttcacaccgcatatggtgcactctcagtacaatctgctctgatgccgcatagttaagccagccccgacacccgccaacacccgctgacgcgccctgacgggcttgtctgctcccggcatccgcttacagacaagctgtgaccgtctcagaacccaaatgtgaccaaccgtttacatatatcttggtttattatttcaatttctcttttcaaacatcttcttctgtcgttgtgcaattttccaaatgccaatttggtcgcttggctatttccaaacgatttcatatattcaagttggagatatagacagtcccctgaacacctcgcatcctctgctttttatgcctgctcgtcctgtgggtataattttaatggtcaaatcgctgctggggaattgtatacgctgctcttgtgtctcactgcctcccttgtagaaatggaaattgcttttccattatttccatgtgattttgttggttttgccatcgaattggcattgaaaacgcataaaaataagcatttcgcatttgcaaagatccaaaagatttatttgcacgctgagcctggggatacacgaaatgtatttgtaagattcttcagatgagtttggaacgcacggaaattaccgtcttgggatttgttggacatcgcatttaagcatgatgtatcatttaattttttccaatttaaaaacaaataatcagtgctacgattaagactggatctattatagacttcttcaaagtttttcagttttctttaaaattacctccataaaactcttttaatattttgaaaatcatctccaggttacatttaatctgattaagtttagagtcagttagtttcccacagttttcttcttgaaataaacccattaagtaaccccaactgatcggcgcaaatgattcagctatgcagaaaatatgattgatgatttttccctcccaccagcccttaacacttgcttaacccttttgtgtggccattatagccctttcctcgtagtctgcttaaagttcattaataagttttgcgtgagccaaaaatggcgccgctttggaatcgtgacagcgtggaaactctggactttggggttgcaaaacttcggaagctgaaagcattttgctgtagccatcgcattttgggggaagaaatccgaattcgagtccaaaccgaattctaatagaagttttgcagcaaagtgcctcagacaggttaatgaccaaaagcagttttgcattcaaatgctgcagcaaccctcgcacgagggttgtcatgacggacgaaaatctaatttacaacatgcaactgccactttgaggggtgacttttacccaagacgtggctgtgaaggaaattctgcgagaaagagattaattacgctctgggggcagttaatgaatgcttgcgcggggcgataaggggttaacgtttggccagctcaaattaccgaatgtataacattttgatgagcatgacaaaaattggaattttcaactcttttttcctgcgaaaagcataacttttccattaacacaatggcgacgatgagccggcaaatcgacgataccaaatcggcataacgtgcatgaaaattatacatgattgatttcatattaatttctacgaatgttatgaatcggctaaaagatgagaatggaaatattgcacgattttgattttgtcatgatgacaaaaaagggttgtaagatttgtacatgccaaaatcataaacttttaacagaaatcaaacacaaagaagtaatataacattaaagtacacaggccttgtcacagagatagaaaaatgtagctattattaaaatatttaacattctcttggtgtctgcaacttttctatcagtcgcttttttattccctttccaacacttatttaaaatgaaatgcactcgaaattaactaatttaatggctcatatcctttgtgctgcttaaaaaggcaggaaacgttttttgtgccctacacctcctccattcaaatgaaaaaggcggtggagtcgaggaaaatgtctgccctggagcttgacaagccaagatatggcccatcaaaaatgttcgaatgttctttttaaataaatgtctcattatatggctgccacgcccacaccgctcaacgcccacacacgtgccgccttccggtttagttgggtggtacctgaccgtagatttttcactgcggacatgtgtccaatcagtggcaacgtgcaacgaaccgtggcaaacacagggaaagaacctcgaagacccacagcaaactcatcctctcgaatttgacactatgataatgcttatattcaattttttgcaacattctatttacactaaactgagaaacaggacaaagttgagaatgggtgctgtgattatttgtcttgtgccaatatatgccctcctgcatataaaatacgagatacaaaaccaaacgaaataagaacgaacaagaaatcagtttaatttcaatgctgatcaaaccaagttgacaactctgttgtatattagctctaataatgacttaaggttcgaaatttaagtaacttccaaaatgggccagataaatactgctaatatcgaatgcaattcaatgaggaaatagtaatcaatcagccaaccctaatgaaattaataatgtaatttaaaactttattccacccattctaataatgaaaatcattaaatatatgtagcaatccaattttgttaatacatattgtatatccctgatttgtcaataccaaagaccagaaaaaacaccatgccaaattccttttattcgttgaaaatcgaaacaactttgaagtattaacctgctggctaaaaaatatgtgtattactaaatataccatgtaatcaaaagttcgaaataaacgtgaaatggcagctccactcgtcagccgtgccacttttcgactaatcaaaatgccttttgaatgcctgagttgaatcaagttggcttaatagttattatcccacgcaagcaaagtcaatggcagagggaaatgcgtagaaattagcacagacttgaatggacgcacgagtgtcgaatggcaggagagtgggaaatgaacggggagttttccaggataaggatgttttcgaagtatcgtaatcatttatagcctccagatacgggagctgcatgtgtcagaggttttcaccgtcatcaccgaaacgcgcgatgcagctctggcccgtgtctcaaaatctctgatgttacattgcacaagataaaaatatatcatcatgaacaataaaactgtctgcttacataaacagtaatacaaggggtgttgaagatcctttgatcttttctacggggtctgacgctcagtggaacgaaaactcacgttaagggattttggtcatgagattatcaaaaaggatcttcacctagatccttttaaattaaaaatgaagttttaaatcaagcccaatctgaataatgttacaaccaattaaccaattctgattagaaaaactcatcgagcatcaaatgaaactgcaatttattcatatcaggattatcaataccatatttttgaaaaagccgtttctgtaatgaaggagaaaactcaccgaggcagttccataggatggcaagatcctggtatcggtctgcgattccgactcgtccaacatcaatacaacctattaatttcccctcgtcaaaaataaggttatcaagtgagaaatcaccatgagtgacgactgaatccggtgagaatggcaaaagtttatgcatttctttccagacttgttcaacaggccagccattacgctcgtcatcaaaatcactcgcatcaaccaaaccgttattcattcgtgattgcgcctgagcgagacgaaatacgcgatcgctgttaaaaggacaattacaaacaggaatcgaatgcaaccggcgcaggaacactgccagcgcatcaacaatattttcacctgaatcaggatattcttctaatacctggaatgctgtttttccggggatcgcagtggtgagtaaccatgcatcatcaggagtacggataaaatgcttgatggtcggaagaggcataaattccgtcagccagtttagtctgaccatctcatctgtaacatcattggcaacgctacctttgccatgtttcagaaacaactctggcgcatcgggcttcccatacaagcgatagattgtcgcacctgattgcccgacattatcgcgagcccatttatacccatataaatcagcatccatgttggaatttaatcgcggcctcgacgtttcccgttgaatatggctcataacaccccttgtattactgtttatgtaagcagacagttttattgttcatgatgatatatttttatcttgtgcaatgtaacatcagagattttgagacacgggccagagctgcatcgcgcgttttcagaattggttaattggttgtaacattattcagattgggcttgatttaaaacttcatttttaatttaaaaggatctaggtgaagatcctttttgataatctcatgaccaaaatcccttaacgtgagttttcgttccactgagcgtcagaccccgtagaaaagatcaaaggatcttctttccataggctccgcccccctgacgagcatcacaaaaatcgacgctcaagtcagaggtggcgaaacccgacaggactataaagataccaggcgtttccccctggaagctccctcgtgcgctctcctgttccgaccctgccgcttaccggatacctgtccgcctttctcccttcgggaagcgtggcgctttctcatagctcacgctgtaggtatctcagttcggtgtaggtcgttcgctccaagctgggctgtgtgcacgaaccccccgttcagcccgaccgctgcgccttatccggtaactatcgtcttgagtccaacccggtaagacacgacttatcgccactggcagcagccactggtaacaggattagcagagcgaggtatgtaggcggtgctacagagttcttgaagtggtggcctaactacggctacactagaagaacagtatttggtatctgcgctctgctgaagccagttaccttcggaaaaagagttggtagctcttgatccggcaaacaaaccaccgctggtagcggtggtttttttgtttgcaagcagcagattacgcgcagaaaaaaaggatctcaaaacgccagcaacgcggcctttttacggttcctggccttttgctggccttttgctcacatgttctttcctgcgttatcccctgattctgtggataaccgtattaccgcctttgagtgagctgataccgctcgccgcagccgaacgaccgagcgcagcgagtcagtgagcgaggaagcggaagagcgcccaatacgcaaaccgcctctc

SEQ ID NO: 8 - DNA, 6260 bp, Artificial Sequence
  Description of Artificial Sequence: Synthetic polynucleotide
cccgcgcgttggccgattcattaatgcagctggcacgacaggtttcccgactggaaagcgggcagtgagcgcaacgcaattttcacacaggaaacagctatgaccatgattacgccaagcttgcatgcatttaaatgacgttggccactccctctctgcgcgctcgctcgctcactgaggccgggcgaccaaaggtcgcccgacgcccgggctttgcccgggcggcctcagtgagcgagcgagcgcgcagagagggagtggccaactccatcactaggggttcctgagtttaaacttcgtcgacgatctgcggccgcacgcgtggagctagttattaatagtaatcaattacggggtcattagttcatagcccatatatggagttccgcgttacataacttacggtaaatggcccgcctggctgaccgcccaacgacccccgcccattgacgtcaataatgacgtatgttcccatagtaacgtcaatagggactttccattgacgtcaatgggtggagtatttacggtaaactgcccacttggcagtacatcaagtgtatcatatgccaagtacgccccctattgacgtcaatgacggtaaatggcccgcctggcattatgcccagtacatgaccttatgggactttcctacttggcagtacatctacgtattagtcatcgctattaccatggtgatgcggttttggcagtacatcaatgggcgtggatagcggtttgactcacggggatttccaagtctccaccccattgacgtcaatgggagtttgttttgcaccaaaatcaacgggactttccaaaatgtcgtaacaactccgccccattgacgcaaatgggcggtaggcgtgtacggtgggaggtctatataagcagagctcgtttagtgaaccgtcagatcgcctggagacgccatccacgctgttttgacctccatagaagacaccgggaccgatccagcctccgcggattcgaatcccggccgggaacggtgcattggaacgcggattccccgtgccaagagtgacgtaagtaccgcctatagagtctataggcccacaaaaaatgctttcttcttttaatatacttttttgtttatcttatttctaatactttccctaatctctttctttcagggcaataatgatacaatgtatcatgcctctttgcaccattctaaagaataacagtgataatttctgggttaaggcaatagcaatatttctgcatataaatatttctgcatataaattgtaactgatgtaagaggtttcatattgctaatagcagctacaatccagctaccattctgcttttattttatggttgggataaggctggattattctgagtccaagctaggcccttttgctaatcatgttcatacctcttatcttcctcccacagctcctgggcaacgtgctggtctgtgtgctggcccatcactttggcaaagaattgggattcgaacatcggccgccaccatgaacgccagcgagttcaggaggaggggcaaggagatggtggactacgtggccaactacatggagggcatcgagggcaggcaggtgtaccccgacgtggagcccggctacctgaggcccctgatccccgccgccgccccccaggagcccgacaccttcgaggacatcatcaacgacgtggagaagatcatcatgcccggcgtgacccactggcacagcccctacttcttcgcctacttccccaccgccagcagctaccccgccatgctggccgacatgctgtgcggcgccatcggctgcatcggcttcagctgggccgccagccccgcctgcaccgagctggagaccgtgatgatggactggctgggcaagatgctggagctgcccaaggccttcctgaacgagaaggccggcgagggcggcggcgtgatccagggcagcgccagcgaggccaccctggtggccctgctggccgccaggaccaaggtgatccacaggctgcaggccgccagccccgagctgacccaggccgccatcatggagaagctggtggcctacagcagcgaccaggcccacagcagcgtggagagggccggcctgatcggcggcgtgaagctgaaggccatccccagcgacggcaacttcgccatgagggccagcgccctgcaggaggccctggagagggacaaggccgccggcctgatccccttcttcatggtggccaccctgggcaccaccacctgctgcagcttcgacaacctgctggaggtgggccccatctgcaacaaggaggacatctggctgcacgtggacgccgcctacgccggcagcgccttcatctgccccgagttcaggcacctgctgaacggcgtggagttcgccgacagcttcaacttcaacccccacaagtggctgctggtgaacttcgactgcagcgccatgtgggtgaagaagaggaccgacctgaccggcgccttcaggctggaccccacctacctgaagcacagccaccaggacagcggcctgatcaccgactacaggcactggcagatccccctgggcaggaggttcaggagcctgaagatgtggttcgtgttcaggatgtacggcgtgaagggcctgcaggcctacatcaggaagcacgtgcagctgagccacgagttcgagagcctggtgaggcaggaccccaggttcgagatctgcgtggaggtgatcctgggcctggtgtgcttcaggctgaagggcagcaacaaggtgaacgaggccctgctgcagaggatcaacagcgccaagaagatccacctggtgccctgccacctgagggacaagttcgtgctgaggttcgccatctgcagcaggaccgtggagagcgcccacgtgcagagggcctgggagcacatcaaggagctggccgccgacgtgctgagggccgagagggagtgagctgctcgagagatctacgggtggcatccctgtgacccctccccagtgcctctcctggccctggaagttgccactccagtgcccaccagccttgtcctaataaaattaagttgcatcattttgtctgactaggtgtccttctataatattatggggtggaggggggtggtatggagcaaggggcaagttgggaagacaacctgtagggcctgcggggtctattgggaaccaagctggagtgcagtggcacaatcttggctcactgcaatctccgcctcctgggttcaagcgattctcctgcctcagcctcccgagttgttgggattccaggcatgcatgaccaggctcagctaatttttgtttttttggtagagacggggtttcaccatattggccaggctggtctccaactcctaatctcaggtgatctacccaccttggcctcccaaattgctgggattacaggcgtgaaccactgctcccttccctgtccttctgattttgtaggtaaccacgtgcggaccgagcggccgcagttaattaagctcgcgaaggaacccctagtgatggagttggccactccctctctgcgcgctcgctcgctcactgaggccgggcgaccaaaggtcgcccgacgcccgggctttgcccgggcggcctcagtgagcgagcgagcgcgcagagagggagtggccaagacgatttaaatggtaccgagctcgaattcactggccgtcgttttacaacgtcgtgactgggaaaaccctggcgttacccaacttaatcgccttgcagcacatccccctttcgccagctggcgtaatagcgaagaggcccgcaccgatcgcccttcccaacagttgcgcagcctgaatggcgaatggcgcctgatgcggtattttctccttacgcatctgtgcggtatttcacaccgcatatggtgcactctcagtacaatctgctctgatgccgcatagttaagccagccccgacacccgccaacacccgctgacgcgccctgacgggcttgtctgctcccggcatccgcttacagacaagctgtgaccgtctccgggagctgcatgtgtcagaggttttcaccgtcatcaccgaaacgcgcgatgcagctctggcccgtgtctcaaaatctctgatgttacattgcacaagataaaaatatatcatcatgaacaataaaactgtctgcttacataaacagtaatacaaggggtgttgaagatcctttgatcttttctacggggtctgacgctcagtggaacgaaaactcacgttaagggattttggtcatgagattatcaaaaaggatcttcacctagatccttttaaattaaaaatgaagttttaaatcaagcccaatctgaataatgttacaaccaattaaccaattctgattagaaaaactcatcgagcatcaaatgaaactgcaatttattcatatcaggattatcaataccatatttttgaaaaagccgtttctgtaatgaaggagaaaactcaccgaggcagttccataggatggcaagatcctggtatcggtctgcgattccgactcgtccaacatcaatacaacctattaatttcccctcgtcaaaaataaggttatcaagtgagaaatcaccatgagtgacgactgaatccggtgagaatggcaaaagtttatgcatttctttccagacttgttcaacaggccagccattacgctcgtcatcaaaatcactcgcatcaaccaaaccgttattcattcgtgattgcgcctgagcgagacgaaatacgcgatcgctgttaaaaggacaattacaaacaggaatcgaatgcaaccggcgcaggaacactgccagcgcatcaacaatattttcacctgaatcaggatattcttctaatacctggaatgctgtttttccggggatcgcagtggtgagtaaccatgcatcatcaggagtacggataaaatgcttgatggtcggaagaggcataaattccgtcagccagtttagtctgaccatctcatctgtaacatcattggcaacgctacctttgccatgtttcagaaacaactctggcgcatcgggcttcccatacaagcgatagattgtcgcacctgattgcccgacattatcgcgagcccatttatacccatataaatcagcatccatgttggaatttaatcgcggcctcgacgtttcccgttgaatatggctcataacaccccttgtattactgtttatgtaagcagacagttttattgttcatgatgatatatttttatcttgtgcaatgtaacatcagagattttgagacacgggccagagctgcatcgcgcgttttcagaattggttaattggttgtaacattattcagattgggcttgatttaaaacttcatttttaatttaaaaggatctaggtgaagatcctttttgataatctcatgaccaaaatcccttaacgtgagttttcgttccactgagcgtcagaccccgtagaaaagatcaaaggatcttctttccataggctccgcccccctgacgagcatcacaaaaatcgacgctcaagtcagaggtggcgaaacccgacaggactataaagataccaggcgtttccccctggaagctccctcgtgcgctctcctgttccgaccctgccgcttaccggatacctgtccgcctttctcccttcgggaagcgtggcgctttctcatagctcacgctgtaggtatctcagttcggtgtaggtcgttcgctccaagctgggctgtgtgcacgaaccccccgttcagcccgaccgctgcgccttatccggtaactatcgtcttgagtccaacccggtaagacacgacttatcgccactggcagcagccactggtaacaggattagcagagcgaggtatgtaggcggtgctacagagttcttgaagtggtggcctaactacggctacactagaagaacagtatttggtatctgcgctctgctgaagccagttaccttcggaaaaagagttggtagctcttgatccggcaaacaaaccaccgctggtagcggtggtttttttgtttgcaagcagcagattacgcgcagaaaaaaaggatctcaaaacgccagcaacgcggcctttttacggttcctggccttttgctggccttttgctcacatgttctttcctgcgttatcccctgattctgtggataaccgtattaccgcctttgagtgagctgataccgctcgccgcagccgaacgaccgagcgcagcgagtcagtgagcgaggaagcggaagagcgcccaatacgcaaaccgcctctc

SEQ ID NO: 9 - DNA, 6442 bp, Artificial Sequence
  Description of Artificial Sequence: Synthetic polynucleotide
cccgcgcgttggccgattcattaatgcagctggcacgacaggtttcccgactggaaagcgggcagtgagcgcaacgcaattttcacacaggaaacagctatgaccatgattacgccaagcttgcatgcatttaaatgacgcagctgcgcgctcgctcgctcactgaggccgcccgggcaaagcccgggcgtcgggcgacctttggtcgcccggcctcagtgagcgagcgagcgcgcagagagggagtggccaactccatcactaggggttgagtttaaacttcgtcgacgatctgcggccgcacgcgtggagctagttattaatagtaatcaattacggggtcattagttcatagcccatatatggagttccgcgttacataacttacggtaaatggcccgcctggctgaccgcccaacgacccccgcccattgacgtcaataatgacgtatgttcccatagtaacgtcaatagggactttccattgacgtcaatgggtggagtatttacggtaaactgcccacttggcagtacatcaagtgtatcatatgccaagtacgccccctattgacgtcaatgacggtaaatggcccgcctggcattatgcccagtacatgaccttatgggactttcctacttggcagtacatctacgtattagtcatcgctattaccatggtgatgcggttttggcagtacatcaatgggcgtggatagcggtttgactcacggggatttccaagtctccaccccattgacgtcaatgggagtttgttttgcaccaaaatcaacgggactttccaaaatgtcgtaacaactccgccccattgacgcaaatgggcggtaggcgtgtacggtgggaggtctatataagcagagctcgtttagtgaaccgtcagatcgcctggagacgccatccacgctgttttgacctccatagaagacaccgggaccgatccagcctccgcggattcgaatcccggccgggaacggtgcattggaacgcggattccccgtgccaagagtgacgtaagtaccgcctatagagtctataggcccacaaaaaatgctttcttcttttaatatacttttttgtttatcttatttctaatactttccctaatctctttctttcagggcaataatgatacaatgtatcatgcctctttgcaccattctaaagaataacagtgataatttctgggttaaggcaatagcaatatttctgcatataaatatttctgcatataaattgtaactgatgtaagaggtttcatattgctaatagcagctacaatccagctaccattctgcttttattttatggttgggataaggctggattattctgagtccaagctaggcccttttgctaatcatgttcatacctcttatcttcctcccacagctcctgggcaacgtgctggtctgtgtgctggcccatcactttggcaaagaattgggattcgaacatcgaattcgggcacgagggaggacagagagcaagtcactcccggctgcctttttcacctctgacagagcccagacaccatgaacgcaagtgaattccgaaggagagggaaggagatggtggattacgtggccaactacatggaaggcattgagggacgccaggtctaccctgacgtggagcccgggtacctgcggccgctgatccctgccgctgcccctcaggagccagacacgtttgaggacatcatcaacgacgttgagaagataatcatgcctggggtgacgcactggcacagcccctacttcttcgcctacttccccactgccagctcgtacccggccatgcttgcggacatgctgtgcggggccattggctgcatcggcttctcctgggcggcaagcccagcatgcacagagctggagactgtgatgatggactggctcgggaagatgctggaactaccaaaggcatttttgaatgagaaagctggagaagggggaggagtgatccagggaagtgccagtgaagccaccctggtggccctgctggccgctcggaccaaagtgatccatcggctgcaggcagcgtccccagagctcacacaggccgctatcatggagaagctggtggcttactcatccgatcaggcacactcctcagtggaaagagctgggttaattggtggagtgaaattaaaagccatcccctcagatggcaacttcgccatgcgtgcgtctgccctgcaggaagccctggagagagacaaagcggctggcctgattcctttctttatggttgccaccctggggaccacaacatgctgctcctttgacaatctcttagaagtcggtcctatctgcaacaaggaagacatatggctgcacgttgatgcagcctacgcaggcagtgcattcatctgccctgagttccggcaccttctgaatggagtggagtttgcagattcattcaactttaatccccacaaatggctattggtgaattttgactgttctgccatgtgggtgaaaaagagaacagacttaacgggagcctttagactggaccccacttacctgaagcacagccatcaggattcagggcttatcactgactaccggcattggcagataccactgggcagaagatttcgctctttgaaaatgtggtttgtatttaggatgtatggagtcaaaggactgcaggcttatatccgcaagcatgtccagctgtcccatgagtttgagtcactggtgcgccaggatccccgctttgaaatctgtgtggaagtcattctggggcttgtctgctttcggctaaagggttccaacaaagtgaatgaagctcttctgcaaagaataaacagtgccaaaaaaatccacttggttccatgtcacctcagggacaagtttgtcctgcgctttgccatctgttctcgcacggtggaatctgcccatgtgcagcgggcctgggaacacatcaaagagctggcggccgacgtgctgcgagcagagagggagtaggagtgaagccagctgcaggaatcaaaaattgaagagagatatatctgaaaactggaataagaagcaaataaatatcatcctgccttcatggaactcagctgtctgtggcttcccatgtctttctccaaagttatccagagggttgtgattttgtctgcttagtatctcatcaacaaagaaatattatttgctaattaaaaagttaatcttcatggccatagcttttattcattagctgtgatttttgttgattaaaacattatagattttcatgttcttgcagtcatcagaagtggtaggaaagcctcactgatatattttccagggcaatcaatgttcacgcaacttgaaattatatctgtggtcttcaaattgtcttttgtcatgtggctaaatgcctaataaacaattcaagtgaaatactaaaaaaaaaaaaaaaaaaaaaagctgctcgagagatctacgggtggcatccctgtgacccctccccagtgcctctcctggccctggaagttgccactccagtgcccaccagccttgtcctaataaaattaagttgcatcattttgtctgactaggtgtccttctataatattatggggtggaggggggtggtatggagcaaggggcaagttgggaagacaacctgtagggcctgcggggtctattgggaaccaagctggagtgcagtggcacaatcttggctcactgcaatctccgcctcctgggttcaagcgattctcctgcctcagcctcccgagttgttgggattccaggcatgcatgaccaggctcagctaatttttgtttttttggtagagacggggtttcaccatattggccaggctggtctccaactcctaatctcaggtgatctacccaccttggcctcccaaattgctgggattacaggcgtgaaccactgctcccttccctgtccttctgattttgtaggtaaccacgtgcggaccgagcggccgcagttaattaagctcgcgaaacccctagtgatggagttggccactccctctctgcgcgctcgctcgctcactgaggccgggcgaccaaaggtcgcccgacgcccgggctttgcccgggcggcctcagtgagcgagcgagcgcgcagctggacgatttaaatggtaccgagctcgaattcactggccgtcgttttacaacgtcgtgactgggaaaaccctggcgttacccaacttaatcgccttgcagcacatccccctttcgccagctggcgtaatagcgaagaggcccgcaccgatcgcccttcccaacagttgcgcagcctgaatggcgaatggcgcctgatgcggtattttctccttacgcatctgtgcggtatttcacaccgcatatggtgcactctcagtacaatctgctctgatgccgcatagttaagccagccccgacacccgccaacacccgctgacgcgccctgacgggcttgtctgctcccggcatccgcttacagacaagctgtgaccgtctccgggagctgcatgtgtcagaggttttcaccgtcatcaccgaaacgcgcgatgcagctctggcccgtgtctcaaaatctctgatgttacattgcacaagataaaaatatatcatcatgaacaataaaactgtctgcttacataaacagtaatacaaggggtgttatgagccatattcaacgggaaacgtcgaggccgcgattaaattccaacatggatgctgatttatatgggtataaatgggctcgcgataatgtcgggcaatcaggtgcgacaatctatcgcttgtatgggaagcccgatgcgccagagttgtttctgaaacatggcaaaggtagcgttgccaatgatgttacagatgagatggtcagactaaactggctgacggaatttatgcctcttccgaccatcaagcattttatccgtactcctgatgatgcatggttactcaccactgcgatccccggaaaaacagcattccaggtattagaagaatatcctgattcaggtgaaaatattgttgatgcgctggcagtgttcctgcgccggttgcattcgattcctgtttgtaattgtccttttaacagcgatcgcgtatttcgtctcgctcaggcgcaatcacgaatgaataacggtttggttgatgcgagtgattttgatgacgagcgtaatggctggcctgttgaacaagtctggaaagaaatgcataaacttttgccattctcaccggattcagtcgtcactcatggtgatttctcacttgataaccttatttttgacgaggggaaattaataggttgtattgatgttggacgagtcggaatcgcagaccgataccaggatcttgccatcctatggaactgcctcggtgagttttctccttcattacagaaacggctttttcaaaaatatggtattgataatcctgatatgaataaattgcagtttcatttgatgctcgatgagtttttctaatcagaattggttaattggttgtaacattattcagattgggcttgatttaaaacttcatttttaatttaaaaggatctaggtgaagatcctttttgataatctcatgaccaaaatcccttaacgtgagttttcgttccactgagcgtcagaccccgtagaaaagatcaaaggatcttcttgagatcctttttttctgcgcgtaatctgctgcttgcaaacaaaaaaaccaccgctaccagcggtggtttgtttgccggatcaagagctaccaactctttttccgaaggtaactggcttcagcagagcgcagataccaaatactgttcttctagtgtagccgtagttaggccaccacttcaagaactctgtagcaccgcctacatacctcgctctgctaatcctgttaccagtggctgctgccagtggcgataagtcgtgtcttaccgggttggactcaagacgatagttaccggataaggcgcagcggtcgggctgaacggggggttcgtgcacacagcccagcttggagcgaacgacctacaccgaactgagatacctacagcgtgagctatgagaaagcgccacgcttcccgaagggagaaaggcggacaggtatccggtaagcggcagggtcggaacaggagagcgcacgagggagcttccagggggaaacgcctggtatctttatagtcctgtcgggtttcgccacctctgacttgagcgtcgatttttgtgatgctcgtcaggggggcggagcctatggaaaaacgccagcaacgcggcctttttacggttcctggccttttgctggccttttgctcacatgttctttcctgcgttatcccctgattctgtggataaccgtattaccgcctttgagtgagctgataccgctcgccgcagccgaacgaccgagcgcagcgagtcagtgagcgaggaagcggaagagcgcccaatacgcaaaccgcctctc

SEQ ID NO: 10 - DNA, 9260 bp, Artificial Sequence
  Description of Artificial Sequence: Synthetic polynucleotide
cccgcgcgttggccgattcattaatgcagctggcacgacaggtttcccgactggaaagcgggcagtgagcgcaacgcaattttcacacaggaaacagctatgaccatgattacgccaagcttgcatgcatttaaatgacgttggccactccctctctgcgcgctcgctcgctcactgaggccgggcgaccaaaggtcgcccgacgcccgggctttgcccgggcggcctcagtgagcgagcgagcgcgcagagagggagtggccaactccatcactaggggttcctgagtttaaacttcgtcgacgatctgcggccgcacgcgtggagctagttattaatagtaatcaattacggggtcattagttcatagcccatatatggagttccgcgttacataacttacggtaaatggcccgcctggctgaccgcccaacgacccccgcccattgacgtcaataatgacgtatgttcccatagtaacgtcaatagggactttccattgacgtcaatgggtggagtatttacggtaaactgcccacttggcagtacatcaagtgtatcatatgccaagtacgccccctattgacgtcaatgacggtaaatggcccgcctggcattatgcccagtacatgaccttatgggactttcctacttggcagtacatctacgtattagtcatcgctattaccatggtgatgcggttttggcagtacatcaatgggcgtggatagcggtttgactcacggggatttccaagtctccaccccattgacgtcaatgggagtttgttttgcaccaaaatcaacgggactttccaaaatgtcgtaacaactccgccccattgacgcaaatgggcggtaggcgtgtacggtgggaggtctatataagcagagctcgtttagtgaaccgtcagatcgcctggagacgccatccacgctgttttgacctccatagaagacaccgggaccgatccagcctccgcggattcgaatcccggccgggaacggtgcattggaacgcggattccccgtgccaagagtgacgtaagtaccgcctatagagtctataggcccacaaaaaatgctttcttcttttaatatacttttttgtttatcttatttctaatactttccctaatctctttctttcagggcaataatgatacaatgtatcatgcctctttgcaccattctaaagaataacagtgataatttctgggttaaggcaatagcaatatttctgcatataaatatttctgcatataaattgtaactgatgtaagaggtttcatattgctaatagcagctacaatccagctaccattctgcttttattttatggttgggataaggctggattattctgagtccaagctaggcccttttgctaatcatgttcatacctcttatcttcctcccacagctcctgggcaacgtgctggtctgtgtgctggcccatcactttggcaaagaattgggattcgaacatcggccgccaccatgaacgccagcgagttcaggaggaggggcaaggagatggtggactacgtggccaactacatggagggcatcgagggcaggcaggtgtaccccgacgtggagcccggctacctgaggcccctgatccccgccgccgccccccaggagcccgacaccttcgaggacatcatcaacgacgtggagaagatcatcatgcccggcgtgacccactggcacagcccctacttcttcgcctacttccccaccgccagcagctaccccgccatgctggccgacatgctgtgcggcgccatcggctgcatcggcttcagctgggccgccagccccgcctgcaccgagctggagaccgtgatgatggactggctgggcaagatgctggagctgcccaaggccttcctgaacgagaaggccggcgagggcggcggcgtgatccagggcagcgccagcgaggccaccctggtggccctgctggccgccaggaccaaggtgatccacaggctgcaggccgccagccccgagctgacccaggccgccatcatggagaagctggtggcctacagcagcgaccaggcccacagcagcgtggagagggccggcctgatcggcggcgtgaagctgaaggccatccccagcgacggcaacttcgccatgagggccagcgccctgcaggaggccctggagagggacaaggccgccggcctgatccccttcttcatggtggccaccctgggcaccaccacctgctgcagcttcgacaacctgctggaggtgggccccatctgcaacaaggaggacatctggctgcacgtggacgccgcctacgccggcagcgccttcatctgccccgagttcaggcacctgctgaacggcgtggagttcgccgacagcttcaacttcaacccccacaagtggctgctggtgaacttcgactgcagcgccatgtgggtgaagaagaggaccgacctgaccggcgccttcaggctggaccccacctacctgaagcacagccaccaggacagcggcctgatcaccgactacaggcactggcagatccccctgggcaggaggttcaggagcctgaagatgtggttcgtgttcaggatgtacggcgtgaagggcctgcaggcctacatcaggaagcacgtgcagctgagccacgagttcgagagcctggtgaggcaggaccccaggttcgagatctgcgtggaggtgatcctgggcctggtgtgcttcaggctgaagggcagcaacaaggtgaacgaggccctgctgcagaggatcaacagcgccaagaagatccacctggtgccctgccacctgagggacaagttcgtgctgaggttcgccatctgcagcaggaccgtggagagcgcccacgtgcagagggcctgggagcacatcaaggagctggccgccgacgtgctgagggccgagagggagtgagctgctcgagagatctacgggtggcatccctgtgacccctccccagtgcctctcctggccctggaagttgccactccagtgcccaccagccttgtcctaataaaattaagttgcatcattttgtctgactaggtgtccttctataatattatggggtggaggggggtggtatggagcaaggggcaagttgggaagacaacctgtagggcctgcggggtctattgggaaccaagctggagtgcagtggcacaatcttggctcactgcaatctccgcctcctgggttcaagcgattctcctgcctcagcctcccgagttgttgggattccaggcatgcatgaccaggctcagctaatttttgtttttttggtagagacggggtttcaccatattggccaggctggtctccaactcctaatctcaggtgatctacccaccttggcctcccaaattgctgggattacaggcgtgaaccactgctcccttccctgtccttctgattttgtaggtaaccacgtgcggaccgagcggccgcagttaattaagctcgcgaaggaacccctagtgatggagttggccactccctctctgcgcgctcgctcgctcactgaggccgggcgaccaaaggtcgcccgacgcccgggctttgcccgggcggcctcagtgagcgagcgagcgcgcagagagggagtggccaagacgatttaaatggtaccgagctcgaattcactggccgtcgttttacaacgtcgtgactgggaaaaccctggcgttacccaacttaatcgccttgcagcacatccccctttcgccagctggcgtaatagcgaagaggcccgcaccgatcgcccttcccaacagttgcgcagcctgaatggcgaatggcgcctgatgcggtattttctccttacgcatctgtgcggtatttcacaccgcatatggtgcactctcagtacaatctgctctgatgccgcatagttaagccagccccgacacccgccaacacccgctgacgcgccctgacgggcttgtctgctcccggcatccgcttacagacaagctgtgaccgtctcagaacccaaatgtgaccaaccgtttacatatatcttggtttattatttcaatttctcttttcaaacatcttcttctgtcgttgtgcaattttccaaatgccaatttggtcgcttggctatttccaaacgatttcatatattcaagttggagatatagacagtcccctgaacacctcgcatcctctgctttttatgcctgctcgtcctgtgggtataattttaatggtcaaatcgctgctggggaattgtatacgctgctcttgtgtctcactgcctcccttgtagaaatggaaattgcttttccattatttccatgtgattttgttggttttgccatcgaattggcattgaaaacgcataaaaataagcatttcgcatttgcaaagatccaaaagatttatttgcacgctgagcctggggatacacgaaatgtatttgtaagattcttcagatgagtttggaacgcacggaaattaccgtcttgggatttgttggacatcgcatttaagcatgatgtatcatttaattttttccaatttaaaaacaaataatcagtgctacgattaagactggatctattatagacttcttcaaagtttttcagttttctttaaaattacctccataaaactcttttaatattttgaaaatcatctccaggttacatttaatctgattaagtttagagtcagttagtttcccacagttttcttcttgaaataaacccattaagtaaccccaactgatcggcgcaaatgattcagctatgcagaaaatatgattgatgatttttccctcccaccagcccttaacacttgcttaacccttttgtgtggccattatagccctttcctcgtagtctgcttaaagttcattaataagttttgcgtgagccaaaaatggcgccgctttggaatcgtgacagcgtggaaactctggactttggggttgcaaaacttcggaagctgaaagcattttgctgtagccatcgcattttgggggaagaaatccgaattcgagtccaaaccgaattctaatagaagttttgcagcaaagtgcctcagacaggttaatgaccaaaagcagttttgcattcaaatgctgcagcaaccctcgcacgagggttgtcatgacggacgaaaatctaatttacaacatgcaactgccactttgaggggtgacttttacccaagacgtggctgtgaaggaaattctgcgagaaagagattaattacgctctgggggcagttaatgaatgcttgcgcggggcgataaggggttaacgtttggccagctcaaattaccgaatgtataacattttgatgagcatgacaaaaattggaattttcaactcttttttcctgcgaaaagcataacttttccattaacacaatggcgacgatgagccggcaaatcgacgataccaaatcggcataacgtgcatgaaaattatacatgattgatttcatattaatttctacgaatgttatgaatcggctaaaagatgagaatggaaatattgcacgattttgattttgtcatgatgacaaaaaagggttgtaagatttgtacatgccaaaatcataaacttttaacagaaatcaaacacaaagaagtaatataacattaaagtacacaggccttgtcacagagatagaaaaatgtagctattattaaaatatttaacattctcttggtgtctgcaacttttctatcagtcgcttttttattccctttccaacacttatttaaaatgaaatgcactcgaaattaactaatttaatggctcatatcctttgtgctgcttaaaaaggcaggaaacgttttttgtgccctacacctcctccattcaaatgaaaaaggcggtggagtcgaggaaaatgtctgccctggagcttgacaagccaagatatggcccatcaaaaatgttcgaatgttctttttaaataaatgtctcattatatggctgccacgcccacaccgctcaacgcccacacacgtgccgccttccggtttagttgggtggtacctgaccgtagatttttcactgcggacatgtgtccaatcagtggcaacgtgcaacgaaccgtggcaaacacagggaaagaacctcgaagacccacagcaaactcatcctctcgaatttgacactatgataatgcttatattcaattttttgcaacattctatttacactaaactgagaaacaggacaaagttgagaatgggtgctgtgattatttgtcttgtgccaatatatgccctcctgcatataaaatacgagatacaaaaccaaacgaaataagaacgaacaagaaatcagtttaatttcaatgctgatcaaaccaagttgacaactctgttgtatattagctctaataatgacttaaggttcgaaatttaagtaacttccaaaatgggccagataaatactgctaatatcgaatgcaattcaatgaggaaatagtaatcaatcagccaaccctaatgaaattaataatgtaatttaaaactttattccacccattctaataatgaaaatcattaaatatatgtagcaatccaattttgttaatacatattgtatatccctgatttgtcaataccaaagaccagaaaaaacaccatgccaaattccttttattcgttgaaaatcgaaacaactttgaagtattaacctgctggctaaaaaatatgtgtattactaaatataccatgtaatcaaaagttcgaaataaacgtgaaatggcagctccactcgtcagccgtgccacttttcgactaatcaaaatgccttttgaatgcctgagttgaatcaagttggcttaatagttattatcccacgcaagcaaagtcaatggcagagggaaatgcgtagaaattagcacagacttgaatggacgcacgagtgtcgaatggcaggagagtgggaaatgaacggggagttttccaggataaggatgttttcgaagtatcgtaatcatttatagcctccagatacgggagctgcatgtgtcagaggttttcaccgtcatcaccgaaacgcgcgatgcagctctggcccgtgtctcaaaatctctgatgttacattgcacaagataaaaatatatcatcatgaacaataaaactgtctgcttacataaacagtaatacaaggggtgttgaagatcctttgatcttttctacggggtctgacgctcagtggaacgaaaactcacgttaagggattttggtcatgagattatcaaaaaggatcttcacctagatccttttaaattaaaaatgaagttttaaatcaagcccaatctgaataatgttacaaccaattaaccaattctgattagaaaaactcatcgagcatcaaatgaaactgcaatttattcatatcaggattatcaataccatatttttgaaaaagccgtttctgtaatgaaggagaaaactcaccgaggcagttccataggatggcaagatcctggtatcggtctgcgattccgactcgtccaacatcaatacaacctattaatttcccctcgtcaaaaataaggttatcaagtgagaaatcaccatgagtgacgactgaatccggtgagaatggcaaaagtttatgcatttctttccagacttgttcaacaggccagccattacgctcgtcatcaaaatcactcgcatcaaccaaaccgttattcattcgtgattgcgcctgagcgagacgaaatacgcgatcgctgttaaaaggacaattacaaacaggaatcgaatgcaaccggcgcaggaacactgccagcgcatcaacaatattttcacctgaatcaggatattcttctaatacctggaatgctgtttttccggggatcgcagtggtgagtaaccatgcatcatcaggagtacggataaaatgcttgatggtcggaagaggcataaattccgtcagccagtttagtctgaccatctcatctgtaacatcattggcaacgctacctttgccatgtttcagaaacaactctggcgcatcgggcttcccatacaagcgatagattgtcgcacctgattgcccgacattatcgcgagcccatttatacccatataaatcagcatccatgttggaatttaatcgcggcctcgacgtttcccgttgaatatggctcataacaccccttgtattactgtttatgtaagcagacagttttattgttcatgatgatatatttttatcttgtgcaatgtaacatcagagattttgagacacgggccagagctgcatcgcgcgttttcagaattggttaattggttgtaacattattcagattgggcttgatttaaaacttcatttttaatttaaaaggatctaggtgaagatcctttttgataatctcatgaccaaaatcccttaacgtgagttttcgttccactgagcgtcagaccccgtagaaaagatcaaaggatcttctttccataggctccgcccccctgacgagcatcacaaaaatcgacgctcaagtcagaggtggcgaaacccgacaggactataaagataccaggcgtttccccctggaagctccctcgtgcgctctcctgttccgaccctgccgcttaccggatacctgtccgcctttctcccttcgggaagcgtggcgctttctcatagctcacgctgtaggtatctcagttcggtgtaggtcgttcgctccaagctgggctgtgtgcacgaaccccccgttcagcccgaccgctgcgccttatccggtaactatcgtcttgagtccaacccggtaagacacgacttatcgccactggcagcagccactggtaacaggattagcagagcgaggtatgtaggcggtgctacagagttcttgaagtggtggcctaactacggctacactagaagaacagtatttggtatctgcgctctgctgaagccagttaccttcggaaaaagagttggtagctcttgatccggcaaacaaaccaccgctggtagcggtggtttttttgtttgcaagcagcagattacgcgcagaaaaaaaggatctcaaaacgccagcaacgcggcctttttacggttcctggccttttgctggccttttgctcacatgttctttcctgcgttatcccctgattctgtggataaccgtattaccgcctttgagtgagctgataccgctcgccgcagccgaacgaccgagcgcagcgagtcagtgagcgaggaagcggaagagcgcccaatacgcaaaccgcctctc

SEQ ID NO: 11 - DNA, 9665 bp, Artificial Sequence
  Description of Artificial Sequence: Synthetic polynucleotide
cccgcgcgttggccgattcattaatgcagctggcacgacaggtttcccgactggaaagcgggcagtgagcgcaacgcaattttcacacaggaaacagctatgaccatgattacgccaagcttgcatgcatttaaatgacgttggccactccctctctgcgcgctcgctcgctcactgaggccgggcgaccaaaggtcgcccgacgcccgggctttgcccgggcggcctcagtgagcgagcgagcgcgcagagagggagtggccaactccatcactaggggttcctgagtttaaacttcgtcgacgatctgcggccgcacgcgtggagctagttattaatagtaatcaattacggggtcattagttcatagcccatatatggagttccgcgttacataacttacggtaaatggcccgcctggctgaccgcccaacgacccccgcccattgacgtcaataatgacgtatgttcccatagtaacgtcaatagggactttccattgacgtcaatgggtggagtatttacggtaaactgcccacttggcagtacatcaagtgtatcatatgccaagtacgccccctattgacgtcaatgacggtaaatggcccgcctggcattatgcccagtacatgaccttatgggactttcctacttggcagtacatctacgtattagtcatcgctattaccatggtgatgcggttttggcagtacatcaatgggcgtggatagcggtttgactcacggggatttccaagtctccaccccattgacgtcaatgggagtttgttttgcaccaaaatcaacgggactttccaaaatgtcgtaacaactccgccccattgacgcaaatgggcggtaggcgtgtacggtgggaggtctatataagcagagctcgtttagtgaaccgtcagatcgcctggagacgccatccacgctgttttgacctccatagaagacaccgggaccgatccagcctccgcggattcgaatcccggccgggaacggtgcattggaacgcggattccccgtgccaagagtgacgtaagtaccgcctatagagtctataggcccacaaaaaatgctttcttcttttaatatacttttttgtttatcttatttctaatactttccctaatctctttctttcagggcaataatgatacaatgtatcatgcctctttgcaccattctaaagaataacagtgataatttctgggttaaggcaatagcaatatttctgcatataaatatttctgcatataaattgtaactgatgtaagaggtttcatattgctaatagcagctacaatccagctaccattctgcttttattttatggttgggataaggctggattattctgagtccaagctaggcccttttgctaatcatgttcatacctcttatcttcctcccacagctcctgggcaacgtgctggtctgtgtgctggcccatcactttggcaaagaattgggattcgaacatcggccgccaccatgaacgcaagtgaattccgaaggagagggaaggagatggtggattacgtggccaactacatggaaggcattgagggacgccaggtctaccctgacgtggagcccgggtacctgcggccgctgatccctgccgctgcccctcaggagccagacacgtttgaggacatcatcaacgacgttgagaagataatcatgcctggggtgacgcactggcacagcccctacttcttcgcctacttccccactgccagctcgtacccggccatgcttgcggacatgctgtgcggggccattggctgcatcggcttctcctgggcggcaagcccagcatgcacagagctggagactgtgatgatggactggctcgggaagatgctggaactaccaaaggcatttttgaatgagaaagctggagaagggggaggagtgatccagggaagtgccagtgaagccaccctggtggccctgctggccgctcggaccaaagtgatccatcggctgcaggcagcgtccccagagctcacacaggccgctatcatggagaagctggtggcttactcatccgatcaggcacactcctcagtggaaagagctgggttaattggtggagtgaaattaaaagccatcccctcagatggcaacttcgccatgcgtgcgtctgccctgcaggaagccctggagagagacaaagcggctggcctgattcctttctttatggttgccaccctggggaccacaacatgctgctcctttgacaatctcttagaagtcggtcctatctgcaacaaggaagacatatggctgcacgttgatgcagcctacgcaggcagtgcattcatctgccctgagttccggcaccttctgaatggagtggagtttgcagattcattcaactttaatccccacaaatggctattggtgaattttgactgttctgccatgtgggtgaaaaagagaacagacttaacgggagcctttagactggaccccacttacctgaagcacagccatcaggattcagggcttatcactgactaccggcattggcagataccactgggcagaagatttcgctctttgaaaatgtggtttgtatttaggatgtatggagtcaaaggactgcaggcttatatccgcaagcatgtccagctgtcccatgagtttgagtcactggtgcgccaggatccccgctttgaaatctgtgtggaagtcattctggggcttgtctgctttcggctaaagggttccaacaaagtgaatgaagctcttctgcaaagaataaacagtgccaaaaaaatccacttggttccatgtcacctcagggacaagtttgtcctgcgctttgccatctgttctcgcacggtggaatctgcccatgtgcagcgggcctgggaacacatcaaagagctggcggccgacgtgctgcgagcagagagggagtaggagtgaagccagctgcaggaatcaaaaattgaagagagatatatctgaaaactggaataagaagcaaataaatatcatcctgccttcatggaactcagctgtctgtggcttcccatgtctttctccaaagttatccagagggttgtgattttgtctgcttagtatctcatcaacaaagaaatattatttgctaattaaaaagttaatcttcatggccatagcttttattcattagctgtgatttttgttgattaaaacattatagattttcatgttcttgcagtcatcagaagtggtaggaaagcctcactgatatattttccagggcaatcaatgttcacgcaacttgaaattatatctgtggtcttcaaattgtcttttgtcatgtggctaaatgcctaataagctgctcgagagatctacgggtggcatccctgtgacccctccccagtgcctctcctggccctggaagttgccactccagtgcccaccagccttgtcctaataaaattaagttgcatcattttgtctgactaggtgtccttctataatattatggggtggaggggggtggtatggagcaaggggcaagttgggaagacaacctgtagggcctgcggggtctattgggaaccaagctggagtgcagtggcacaatcttggctcactgcaatctccgcctcctgggttcaagcgattctcctgcctcagcctcccgagttgttgggattccaggcatgcatgaccaggctcagctaatttttgtttttttggtagagacggggtttcaccatattggccaggctggtctccaactcctaatctcaggtgatctacccaccttggcctcccaaattgctgggattacaggcgtgaaccactgctcccttccctgtccttctgattttgtaggtaaccacgtgcggaccgagcggccgcagttaattaagctcgcgaaggaacccctagtgatggagttggccactccctctctgcgcgctcgctcgctcactgaggccgggcgaccaaaggtcgcccgacgcccgggctttgcccgggcggcctcagtgagcgagcgagcgcgcagagagggagtggccaagacgatttaaatggtaccgagctcgaattcactggccgtcgttttacaacgtcgtgactgggaaaaccctggcgttacccaacttaatcgccttgcagcacatccccctttcgccagctggcgtaatagcgaagaggcccgcaccgatcgcccttcccaacagttgcgcagcctgaatggcgaatggcgcctgatgcggtattttctccttacgcatctgtgcggtatttcacaccgcatatggtgcactctcagtacaatctgctctgatgccgcatagttaagccagccccgacacccgccaacacccgctgacgcgccctgacgggcttgtctgctcccggcatccgcttacagacaagctgtgaccgtctcagaacccaaatgtgaccaaccgtttacatatatcttggtttattatttcaatttctcttttcaaacatcttcttctgtcgttgtgcaattttccaaatgccaatttggtcgcttggctatttccaaacgatttcatatattcaagttggagatatagacagtcccctgaacacctcgcatcctctgctttttatgcctgctcgtcctgtgggtataattttaatggtcaaatcgctgctggggaattgtatacgctgctcttgtgtctcactgcctcccttgtagaaatggaaattgcttttccattatttccatgtgattttgttggttttgccatcgaattggcattgaaaacgcataaaaataagcatttcgcatttgcaaagatccaaaagatttatttgcacgctgagcctggggatacacgaaatgtatttgtaagattcttcagatgagtttggaacgcacggaaattaccgtcttgggatttgttggacatcgcatttaagcatgatgtatcatttaattttttccaatttaaaaacaaataatcagtgctacgattaagactggatctattatagacttcttcaaagtttttcagttttctttaaaattacctccataaaactcttttaatattttgaaaatcatctccaggttacatttaatctgattaagtttagagtcagttagtttcccacagttttcttcttgaaataaacccattaagtaaccccaactgatcggcgcaaatgattcagctatgcagaaaatatgattgatgatttttccctcccaccagcccttaacacttgcttaacccttttgtgtggccattatagccctttcctcgtagtctgcttaaagttcattaataagttttgcgtgagccaaaaatggcgccgctttggaatcgtgacagcgtggaaactctggactttggggttgcaaaacttcggaagctgaaagcattttgctgtagccatcgcattttgggggaagaaatccgaattcgagtccaaaccgaattctaatagaagttttgcagcaaagtgcctcagacaggttaatgaccaaaagcagttttgcattcaaatgctgcagcaaccctcgcacgagggttgtcatgacggacgaaaatctaatttacaacatgcaactgccactttgaggggtgacttttacccaagacgtggctgtgaaggaaattctgcgagaaagagattaattacgctctgggggcagttaatgaatgcttgcgcggggcgataaggggttaacgtttggccagctcaaattaccgaatgtataacattttgatgagcatgacaaaaattggaattttcaactcttttttcctgcgaaaagcataacttttccattaacacaatggcgacgatgagccggcaaatcgacgataccaaatcggcataacgtgcatgaaaattatacatgattgatttcatattaatttctacgaatgttatgaatcggctaaaagatgagaatggaaatattgcacgattttgattttgtcatgatgacaaaaaagggttgtaagatttgtacatgccaaaatcataaacttttaacagaaatcaaacacaaagaagtaatataacattaaagtacacaggccttgtcacagagatagaaaaatgtagctattattaaaatatttaacattctcttggtgtctgcaacttttctatcagtcgcttttttattccctttccaacacttatttaaaatgaaatgcactcgaaattaactaatttaatggctcatatcctttgtgctgcttaaaaaggcaggaaacgttttttgtgccctacacctcctccattcaaatgaaaaaggcggtggagtcgaggaaaatgtctgccctggagcttgacaagccaagatatggcccatcaaaaatgttcgaatgttctttttaaataaatgtctcattatatggctgccacgcccacaccgctcaacgcccacacacgtgccgccttccggtttagttgggtggtacctgaccgtagatttttcactgcggacatgtgtccaatcagtggcaacgtgcaacgaaccgtggcaaacacagggaaagaacctcgaagacccacagcaaactcatcctctcgaatttgacactatgataatgcttatattcaattttttgcaacattctatttacactaaactgagaaacaggacaaagttgagaatgggtgctgtgattatttgtcttgtgccaatatatgccctcctgcatataaaatacgagatacaaaaccaaacgaaataagaacgaacaagaaatcagtttaatttcaatgctgatcaaaccaagttgacaactctgttgtatattagctctaataatgacttaaggttcgaaatttaagtaacttccaaaatgggccagataaatactgctaatatcgaatgcaattcaatgaggaaatagtaatcaatcagccaaccctaatgaaattaataatgtaatttaaaactttattccacccattctaataatgaaaatcattaaatatatgtagcaatccaattttgttaatacatattgtatatccctgatttgtcaataccaaagaccagaaaaaacaccatgccaaattccttttattcgttgaaaatcgaaacaactttgaagtattaacctgctggctaaaaaatatgtgtattactaaatataccatgtaatcaaaagttcgaaataaacgtgaaatggcagctccactcgtcagccgtgccacttttcgactaatcaaaatgccttttgaatgcctgagttgaatcaagttggcttaatagttattatcccacgcaagcaaagtcaatggcagagggaaatgcgtagaaattagcacagacttgaatggacgcacgagtgtcgaatggcaggagagtgggaaatgaacggggagttttccaggataaggatgttttcgaagtatcgtaatcatttatagcctccagatacgggagctgcatgtgtcagaggttttcaccgtcatcaccgaaacgcgcgatgcagctctggcccgtgtctcaaaatctctgatgttacattgcacaagataaaaatatatcatcatgaacaataaaactgtctgcttacataaacagtaatacaaggggtgttgaagatcctttgatcttttctacggggtctgacgctcagtggaacgaaaactcacgttaagggattttggtcatgagattatcaaaaaggatcttcacctagatccttttaaattaaaaatgaagttttaaatcaagcccaatctgaataatgttacaaccaattaaccaattctgattagaaaaactcatcgagcatcaaatgaaactgcaatttattcatatcaggattatcaataccatatttttgaaaaagccgtttctgtaatgaaggagaaaactcaccgaggcagttccataggatggcaagatcctggtatcggtctgcgattccgactcgtccaacatcaatacaacctattaatttcccctcgtcaaaaataaggttatcaagtgagaaatcaccatgagtgacgactgaatccggtgagaatggcaaaagtttatgcatttctttccagacttgttcaacaggccagccattacgctcgtcatcaaaatcactcgcatcaaccaaaccgttattcattcgtgattgcgcctgagcgagacgaaatacgcgatcgctgttaaaaggacaattacaaacaggaatcgaatgcaaccggcgcaggaacactgccagcgcatcaacaatattttcacctgaatcaggatattcttctaatacctggaatgctgtttttccggggatcgcagtggtgagtaaccatgcatcatcaggagtacggataaaatgcttgatggtcggaagaggcataaattccgtcagccagtttagtctgaccatctcatctgtaacatcattggcaacgctacctttgccatgtttcagaaacaactctggcgcatcgggcttcccatacaagcgatagattgtcgcacctgattgcccgacattatcgcgagcccatttatacccatataaatcagcatccatgttggaatttaatcgcggcctcgacgtttcccgttgaatatggctcataacaccccttgtattactgtttatgtaagcagacagttttattgttcatgatgatatatttttatcttgtgcaatgtaacatcagagattttgagacacgggccagagctgcatcgcgcgttttcagaattggttaattggttgtaacattattcagattgggcttgatttaaaacttcatttttaatttaaaaggatctaggtgaagatcctttttgataatctcatgaccaaaatcccttaacgtgagttttcgttccactgagcgtcagaccccgtagaaaagatcaaaggatcttctttccataggctccgcccccctgacgagcatcacaaaaatcgacgctcaagtcagaggtggcgaaacccgacaggactataaagataccaggcgtttccccctggaagctccctcgtgcgctctcctgttccgaccctgccgcttaccggatacctgtccgcctttctcccttcgggaagcgtggcgctttctcatagctcacgctgtaggtatctcagttcggtgtaggtcgttcgctccaagctgggctgtgtgcacgaaccccccgttcagcccgaccgctgcgccttatccggtaactatcgtcttgagtccaacccggtaagacacgacttatcgccactggcagcagccactggtaacaggattagcagagcgaggtatgtaggcggtgctacagagttcttgaagtggtggcctaactacggctacactagaagaacagtatttggtatctgcgctctgctgaagccagttaccttcggaaaaagagttggtagctcttgatccggcaaacaaaccaccgctggtagcggtggtttttttgtttgcaagcagcagattacgcgcagaaaaaaaggatctcaaaacgccagcaacgcggcctttttacggttcctggccttttgctggccttttgctcacatgttctttcctgcgttatcccctgattctgtggataaccgtattaccgcctttgagtgagctgataccgctcgccgcagccgaacgaccgagcgcagcgagtcagtgagcgaggaagcggaagagcgcccaatacgcaaaccgcctctc

SEQ ID NO: 12 - DNA, 6236 bp, Artificial Sequence
  Description of Artificial Sequence: Synthetic polynucleotide
cccgcgcgttggccgattcattaatgcagctggcacgacaggtttcccgactggaaagcgggcagtgagcgcaacgcaattttcacacaggaaacagctatgaccatgattacgccaagcttgcatgcatttaaatgacgcagctgcgcgctcgctcgctcactgaggccgcccgggcaaagcccgggcgtcgggcgacctttggtcgcccggcctcagtgagcgagcgagcgcgcagagagggagtggccaactccatcactaggggttgagtttaaacttcgtcgacgatctgcggccgcacgcgtggagctagttattaatagtaatcaattacggggtcattagttcatagcccatatatggagttccgcgttacataacttacggtaaatggcccgcctggctgaccgcccaacgacccccgcccattgacgtcaataatgacgtatgttcccatagtaacgtcaatagggactttccattgacgtcaatgggtggagtatttacggtaaactgcccacttggcagtacatcaagtgtatcatatgccaagtacgccccctattgacgtcaatgacggtaaatggcccgcctggcattatgcccagtacatgaccttatgggactttcctacttggcagtacatctacgtattagtcatcgctattaccatggtgatgcggttttggcagtacatcaatgggcgtggatagcggtttgactcacggggatttccaagtctccaccccattgacgtcaatgggagtttgttttgcaccaaaatcaacgggactttccaaaatgtcgtaacaactccgccccattgacgcaaatgggcggtaggcgtgtacggtgggaggtctatataagcagagctcgtttagtgaaccgtcagatcgcctggagacgccatccacgctgttttgacctccatagaagacaccgggaccgatccagcctccgcggattcgaatcccggccgggaacggtgcattggaacgcggattccccgtgccaagagtgacgtaagtaccgcctatagagtctataggcccacaaaaaatgctttcttcttttaatatacttttttgtttatcttatttctaatactttccctaatctctttctttcagggcaataatgatacaatgtatcatgcctctttgcaccattctaaagaataacagtgataatttctgggttaaggcaatagcaatatttctgcatataaatatttctgcatataaattgtaactgatgtaagaggtttcatattgctaatagcagctacaatccagctaccattctgcttttattttatggttgggataaggctggattattctgagtccaagctaggcccttttgctaatcatgttcatacctcttatcttcctcccacagctcctgggcaacgtgctggtctgtgtgctggcccatcactttggcaaagaattgggattcgaacatcggccgccaccatgaacgcaagtgaattccgaaggagagggaaggagatggtggattacgtggccaactacatggaaggcattgagggacgccaggtctaccctgacgtggagcccgggtacctgcggccgctgatccctgccgctgcccctcaggagccagacacgtttgaggacatcatcaacgacgttgagaagataatcatgcctggggtgacgcactggcacagcccctacttcttcgcctacttccccactgccagctcgtacccggccatgcttgcggacatgctgtgcggggccattggctgcatcggcttctcctgggcggcaagcccagcatgcacagagctggagactgtgatgatggactggctcgggaagatgctggaactaccaaaggcatttttgaatgagaaagctggagaagggggaggagtgatccagggaagtgccagtgaagccaccctggtggccctgctggccgctcggaccaaagtgatccatcggctgcaggcagcgtccccagagctcacacaggccgctatcatggagaagctggtggcttactcatccgatcaggcacactcctcagtggaaagagctgggttaattggtggagtgaaattaaaagccatcccctcagatggcaacttcgccatgcgtgcgtctgccctgcaggaagccctggagagagacaaagcggctggcctgattcctttctttatggttgccaccctggggaccacaacatgctgctcctttgacaatctcttagaagtcggtcctatctgcaacaaggaagacatatggctgcacgttgatgcagcctacgcaggcagtgcattcatctgccctgagttccggcaccttctgaatggagtggagtttgcagattcattcaactttaatccccacaaatggctattggtgaattttgactgttctgccatgtgggtgaaaaagagaacagacttaacgggagcctttagactggaccccacttacctgaagcacagccatcaggattcagggcttatcactgactaccggcattggcagataccactgggcagaagatttcgctctttgaaaatgtggtttgtatttaggatgtatggagtcaaaggactgcaggcttatatccgcaagcatgtccagctgtcccatgagtttgagtcactggtgcgccaggatccccgctttgaaatctgtgtggaagtcattctggggcttgtctgctttcggctaaagggttccaacaaagtgaatgaagctcttctgcaaagaataaacagtgccaaaaaaatccacttggttccatgtcacctcagggacaagtttgtcctgcgctttgccatctgttctcgcacggtggaatctgcccatgtgcagcgggcctgggaacacatcaaagagctggcggccgacgtgctgcgagcagagagggagtaggagtgagctgctcgagagatctacgggtggcatccctgtgacccctccccagtgcctctcctggccctggaagttgccactccagtgcccaccagccttgtcctaataaaattaagttgcatcattttgtctgactaggtgtccttctataatattatggggtggaggggggtggtatggagcaaggggcaagttgggaagacaacctgtagggcctgcggggtctattgggaaccaagctggagtgcagtggcacaatcttggctcactgcaatctccgcctcctgggttcaagcgattctcctgcctcagcctcccgagttgttgggattccaggcatgcatgaccaggctcagctaatttttgtttttttggtagagacggggtttcaccatattggccaggctggtctccaactcctaatctcaggtgatctacccaccttggcctcccaaattgctgggattacaggcgtgaaccactgctcccttccctgtccttctgattttgtaggtaaccacgtgcggaccgagcggccgcagttaattaagctcgcgaaacccctagtgatggagttggccactccctctctgcgcgctcgctcgctcactgaggccgggcgaccaaaggtcgcccgacgcccgggctttgcccgggcggcctcagtgagcgagcgagcgcgcagctggacgatttaaatggtaccgagctcgaattcactggccgtcgttttacaacgtcgtgactgggaaaaccctggcgttacccaacttaatcgccttgcagcacatccccctttcgccagctggcgtaatagcgaagaggcccgcaccgatcgcccttcccaacagttgcgcagcctgaatggcgaatggcgcctgatgcggtattttctccttacgcatctgtgcggtatttcacaccgcatatggtgcactctcagtacaatctgctctgatgccgcatagttaagccagccccgacacccgccaacacccgctgacgcgccctgacgggcttgtctgctcccggcatccgcttacagacaagctgtgaccgtctccgggagctgcatgtgtcagaggttttcaccgtcatcaccgaaacgcgcgatgcagctctggcccgtgtctcaaaatctctgatgttacattgcacaagataaaaatatatcatcatgaacaataaaactgtctgcttacataaacagtaatacaaggggtgttgaagatcctttgatcttttctacggggtctgacgctcagtggaacgaaaactcacgttaagggattttggtcatgagattatcaaaaaggatcttcacctagatccttttaaattaaaaatgaagttttaaatcaagcccaatctgaataatgttacaaccaattaaccaattctgattagaaaaactcatcgagcatcaaatgaaactgcaatttattcatatcaggattatcaataccatatttttgaaaaagccgtttctgtaatgaaggagaaaactcaccgaggcagttccataggatggcaagatcctggtatcggtctgcgattccgactcgtccaacatcaatacaacctattaatttcccctcgtcaaaaataaggttatcaagtgagaaatcaccatgagtgacgactgaatccggtgagaatggcaaaagtttatgcatttctttccagacttgttcaacaggccagccattacgctcgtcatcaaaatcactcgcatcaaccaaaccgttattcattcgtgattgcgcctgagcgagacgaaatacgcgatcgctgttaaaaggacaattacaaacaggaatcgaatgcaaccggcgcaggaacactgccagcgcatcaacaatattttcacctgaatcaggatattcttctaatacctggaatgctgtttttccggggatcgcagtggtgagtaaccatgcatcatcaggagtacggataaaatgcttgatggtcggaagaggcataaattccgtcagccagtttagtctgaccatctcatctgtaacatcattggcaacgctacctttgccatgtttcagaaacaactctggcgcatcgggcttcccatacaagcgatagattgtcgcacctgattgcccgacattatcgcgagcccatttatacccatataaatcagcatccatgttggaatttaatcgcggcctcgacgtttcccgttgaatatggctcataacaccccttgtattactgtttatgtaagcagacagttttattgttcatgatgatatatttttatcttgtgcaatgtaacatcagagattttgagacacgggccagagctgcatcgcgcgttttcagaattggttaattggttgtaacattattcagattgggcttgatttaaaacttcatttttaatttaaaaggatctaggtgaagatcctttttgataatctcatgaccaaaatcccttaacgtgagttttcgttccactgagcgtcagaccccgtagaaaagatcaaaggatcttctttccataggctccgcccccctgacgagcatcacaaaaatcgacgctcaagtcagaggtggcgaaacccgacaggactataaagataccaggcgtttccccctggaagctccctcgtgcgctctcctgttccgaccctgccgcttaccggatacctgtccgcctttctcccttcgggaagcgtggcgctttctcatagctcacgctgtaggtatctcagttcggtgtaggtcgttcgctccaagctgggctgtgtgcacgaaccccccgttcagcccgaccgctgcgccttatccggtaactatcgtcttgagtccaacccggtaagacacgacttatcgccactggcagcagccactggtaacaggattagcagagcgaggtatgtaggcggtgctacagagttcttgaagtggtggcctaactacggctacactagaagaacagtatttggtatctgcgctctgctgaagccagttaccttcggaaaaagagttggtagctcttgatccggcaaacaaaccaccgctggtagcggtggtttttttgtttgcaagcagcagattacgcgcagaaaaaaaggatctcaaaacgccagcaacgcggcctttttacggttcctggccttttgctggccttttgctcacatgttctttcctgcgttatcccctgattctgtggataaccgtattaccgcctttgagtgagctgataccgctcgccgcagccgaacgaccgagcgcagcgagtcagtgagcgaggaagcggaagagcgcccaatacgcaaaccgcctctc

SEQ ID NO: 13 - DNA, 3535 bp, Artificial Sequence
  Description of Artificial Sequence: Synthetic polynucleotide
ctgcgcgctcgctcgctcactgaggccgcccgggcaaagcccgggcgtcgggcgacctttggtcgcccggcctcagtgagcgagcgagcgcgcagagagggagtggccaactccatcactaggggttccttgtagttaatgattaacccgccatgctacttatctacgtagccatgctctagagcggccgcacgcgtggagctagttattaatagtaatcaattacggggtcattagttcatagcccatatatggagttccgcgttacataacttacggtaaatggcccgcctggctgaccgcccaacgacccccgcccattgacgtcaataatgacgtatgttcccatagtaacgtcaatagggactttccattgacgtcaatgggtggagtatttacggtaaactgcccacttggcagtacatcaagtgtatcatatgccaagtacgccccctattgacgtcaatgacggtaaatggcccgcctggcattatgcccagtacatgaccttatgggactttcctacttggcagtacatctacgtattagtcatcgctattaccatggtgatgcggttttggcagtacatcaatgggcgtggatagcggtttgactcacggggatttccaagtctccaccccattgacgtcaatgggagtttgttttgcaccaaaatcaacgggactttccaaaatgtcgtaacaactccgccccattgacgcaaatgggcggtaggcgtgtacggtgggaggtctatataagcagagctcgtttagtgaaccgtcagatcgcctggagacgccatccacgctgttttgacctccatagaagacaccgggaccgatccagcctccgcggattcgaatcccggccgggaacggtgcattggaacgcggattccccgtgccaagagtgacgtaagtaccgcctatagagtctataggcccacaaaaaatgctttcttcttttaatatacttttttgtttatcttatttctaatactttccctaatctctttctttcagggcaataatgatacaatgtatcatgcctctttgcaccattctaaagaataacagtgataatttctgggttaaggcaatagcaatatttctgcatataaatatttctgcatataaattgtaactgatgtaagaggtttcatattgctaatagcagctacaatccagctaccattctgcttttattttatggttgggataaggctggattattctgagtccaagctaggcccttttgctaatcatgttcatacctcttatcttcctcccacagctcctgggcaacgtgctggtctgtgtgctggcccatcactttggcaaagaattgggattcgaacatcggccgccaccatgaacgcaagtgaattccgaaggagagggaaggagatggtggattacgtggccaactacatggaaggcattgagggacgccaggtctaccctgacgtggagcccgggtacctgcggccgctgatccctgccgctgcccctcaggagccagacacgtttgaggacatcatcaacgacgttgagaagataatcatgcctggggtgacgcactggcacagcccctacttcttcgcctacttccccactgccagctcgtacccggccatgcttgcggacatgctgtgcggggccattggctgcatcggcttctcctgggcggcaagcccagcatgcacagagctggagactgtgatgatggactggctcgggaagatgctggaactaccaaaggcatttttgaatgagaaagctggagaagggggaggagtgatccagggaagtgccagtgaagccaccctggtggccctgctggccgctcggaccaaagtgatccatcggctgcaggcagcgtccccagagctcacacaggccgctatcatggagaagctggtggcttactcatccgatcaggcacactcctcagtggaaagagctgggttaattggtggagtgaaattaaaagccatcccctcagatggcaacttcgccatgcgtgcgtctgccctgcaggaagccctggagagagacaaagcggctggcctgattcctttctttatggttgccaccctggggaccacaacatgctgctcctttgacaatctcttagaagtcggtcctatctgcaacaaggaagacatatggctgcacgttgatgcagcctacgcaggcagtgcattcatctgccctgagttccggcaccttctgaatggagtggagtttgcagattcattcaactttaatccccacaaatggctattggtgaattttgactgttctgccatgtgggtgaaaaagagaacagacttaacgggagcctttagactggaccccacttacctgaagcacagccatcaggattcagggcttatcactgactaccggcattggcagataccactgggcagaagatttcgctctttgaaaatgtggtttgtatttaggatgtatggagtcaaaggactgcaggcttatatccgcaagcatgtccagctgtcccatgagtttgagtcactggtgcgccaggatccccgctttgaaatctgtgtggaagtcattctggggcttgtctgctttcggctaaagggttccaacaaagtgaatgaagctcttctgcaaagaataaacagtgccaaaaaaatccacttggttccatgtcacctcagggacaagtttgtcctgcgctttgccatctgttctcgcacggtggaatctgcccatgtgcagcgggcctgggaacacatcaaagagctggcggccgacgtgctgcgagcagagagggagtaggagtgagctgctcgagagatctacgggtggcatccctgtgacccctccccagtgcctctcctggccctggaagttgccactccagtgcccaccagccttgtcctaataaaattaagttgcatcattttgtctgactaggtgtccttctataatattatggggtggaggggggtggtatggagcaaggggcaagttgggaagacaacctgtagggcctgcggggtctattgggaaccaagctggagtgcagtggcacaatcttggctcactgcaatctccgcctcctgggttcaagcgattctcctgcctcagcctcccgagttgttgggattccaggcatgcatgaccaggctcagctaatttttgtttttttggtagagacggggtttcaccatattggccaggctggtctccaactcctaatctcaggtgatctacccaccttggcctcccaaattgctgggattacaggcgtgaaccactgctcccttccctgtccttctgattttgtaggtaaccccggaccacgtgcggaccgagcggccgctctagagcatggctacgtagataagtagcatggcgggttaatcattaactacaaggaacccctagtgatggagttggccactccctctctgcgcgctcgctcgctcactgaggccgggcgaccaaaggtcgcccgacgcccgggcggcctcagtgagcgagcgagcgcgcag

SEQ ID NO: 14 - DNA, 3534 bp, Artificial Sequence
  Description of Artificial Sequence: Synthetic polynucleotide
ctgcgcgctcgctcgctcactgaggccgcccgggcaaagcccgggcgtcgggcgacctttggtcgcccggcctcagtgagcgagcgagcgcgcagagagggagtggccaactccatcactaggggttccttgtagttaatgattaacccgccatgctacttatctacgtagccatgctctagagcggccgcacgcgtggagctagttattaatagtaatcaattacggggtcattagttcatagcccatatatggagttccgcgttacataacttacggtaaatggcccgcctggctgaccgcccaacgacccccgcccattgacgtcaataatgacgtatgttcccatagtaacgtcaatagggactttccattgacgtcaatgggtggagtatttacggtaaactgcccacttggcagtacatcaagtgtatcatatgccaagtacgccccctattgacgtcaatgacggtaaatggcccgcctggcattatgcccagtacatgaccttatgggactttcctacttggcagtacatctacgtattagtcatcgctattaccatggtgatgcggttttggcagtacatcaatgggcgtggatagcggtttgactcacggggatttccaagtctccaccccattgacgtcaatgggagtttgttttgcaccaaaatcaacgggactttccaaaatgtcgtaacaactccgccccattgacgcaaatgggcggtaggcgtgtacggtgggaggtctatataagcagagctcgtttagtgaaccgtcagatcgcctggagacgccatccacgctgttttgacctccatagaagacaccgggaccgatccagcctccgcggattcgaatcccggccgggaacggtgcattggaacgcggattccccgtgccaagagtgacgtaagtaccgcctatagagtctataggcccacaaaaaatgctttcttcttttaatatacttttttgtttatcttatttctaatactttccctaatctctttctttcagggcaataatgatacaatgtatcatgcctctttgcaccattctaaagaataacagtgataatttctgggttaaggcaatagcaatatttctgcatataaatatttctgcatataaattgtaactgatgtaagaggtttcatattgctaatagcagctacaatccagctaccattctgcttttattttatggttgggataaggctggattattctgagtccaagctaggcccttttgctaatcatgttcatacctcttatcttcctcccacagctcctgggcaacgtgctggtctgtgtgctggcccatcactttggcaaagaattgggattcgaacatcggccgccaccatgaacgccagcgagttcaggaggaggggcaaggagatggtggactacgtggccaactacatggagggcatcgagggcaggcaggtgtaccccgacgtggagcccggctacctgaggcccctgatccccgccgccgccccccaggagcccgacaccttcgaggacatcatcaacgacgtggagaagatcatcatgcccggcgtgacccactggcacagcccctacttcttcgcctacttccccaccgccagcagctaccccgccatgctggccgacatgctgtgcggcgccatcggctgcatcggcttcagctgggccgccagccccgcctgcaccgagctggagaccgtgatgatggactggctgggcaagatgctggagctgcccaaggccttcctgaacgagaaggccggcgagggcggcggcgtgatccagggcagcgccagcgaggccaccctggtggccctgctggccgccaggaccaaggtgatccacaggctgcaggccgccagccccgagctgacccaggccgccatcatggagaagctggtggcctacagcagcgaccaggcccacagcagcgtggagagggccggcctgatcggcggcgtgaagctgaaggccatccccagcgacggcaacttcgccatgagggccagcgccctgcaggaggccctggagagggacaaggccgccggcctgatccccttcttcatggtggccaccctgggcaccaccacctgctgcagcttcgacaacctgctggaggtgggccccatctgcaacaaggaggacatctggctgcacgtggacgccgcctacgccggcagcgccttcatctgccccgagttcaggcacctgctgaacggcgtggagttcgccgacagcttcaacttcaacccccacaagtggctgctggtgaacttcgactgcagcgccatgtgggtgaagaagaggaccgacctgaccggcgccttcaggctggaccccacctacctgaagcacagccaccaggacagcggcctgatcaccgactacaggcactggcagatccccctgggcaggaggttcaggagcctgaagatgtggttcgtgttcaggatgtacggcgtgaagggcctgcaggcctacatcaggaagcacgtgcagctgagccacgagttcgagagcctggtgaggcaggaccccaggttcgagatctgcgtggaggtgatcctgggcctggtgtgcttcaggctgaagggcagcaacaaggtgaacgaggccctgctgcagaggatcaacagcgccaagaagatccacctggtgccctgccacctgagggacaagttcgtgctgaggttcgccatctgcagcaggaccgtggagagcgcccacgtgcagagggcctgggagcacatcaaggagctggccgccgacgtgctgagggccgagagggagtgagctgctcgagagatctacgggtggcatccctgtgacccctccccagtgcctctcctggccctggaagttgccactccagtgcccaccagccttgtcctaataaaattaagttgcatcattttgtctgactaggtgtccttctataatattatggggtggaggggggtggtatggagcaaggggcaagttgggaagacaacctgtagggcctgcggggtctattgggaaccaagctggagtgcagtggcacaatcttggctcactgcaatctccgcctcctgggttcaagcgattctcctgcctcagcctcccgagttgttgggattccaggcatgcatgaccaggctcagctaatttttgtttttttggtagagacggggtttcaccatattggccaggctggtctccaactcctaatctcaggtgatctacccaccttggcctcccaaattgctgggattacaggcgtgaaccactgctcccttccctgtccttctgattttgtaggtaacgtaaccccggaccacgtgcggaccgagcggccgctctagagcatggctacgtagataagtagcatggcgggttaatcattaactacaaggaacccctagtgatggagttggccactccctctctgcgcgctcgctcgctcactgaggccgggcgaccaaaggtcgcccgacgcccgggcggcctcagtgagcgagcgagcgcgcag

SEQ ID NO: 15 - DNA, 3940 bp, Artificial Sequence
  Description of Artificial Sequence: Synthetic polynucleotide
ctgcgcgctcgctcgctcactgaggccgcccgggcaaagcccgggcgtcgggcgacctttggtcgcccggcctcagtgagcgagcgagcgcgcagagagggagtggccaactccatcactaggggttccttgtagttaatgattaacccgccatgctacttatctacgtagccatgctctagagcggccgcacgcgtggagctagttattaatagtaatcaattacggggtcattagttcatagcccatatatggagttccgcgttacataacttacggtaaatggcccgcctggctgaccgcccaacgacccccgcccattgacgtcaataatgacgtatgttcccatagtaacgtcaatagggactttccattgacgtcaatgggtggagtatttacggtaaactgcccacttggcagtacatcaagtgtatcatatgccaagtacgccccctattgacgtcaatgacggtaaatggcccgcctggcattatgcccagtacatgaccttatgggactttcctacttggcagtacatctacgtattagtcatcgctattaccatggtgatgcggttttggcagtacatcaatgggcgtggatagcggtttgactcacggggatttccaagtctccaccccattgacgtcaatgggagtttgttttgcaccaaaatcaacgggactttccaaaatgtcgtaacaactccgccccattgacgcaaatgggcggtaggcgtgtacggtgggaggtctatataagcagagctcgtttagtgaaccgtcagatcgcctggagacgccatccacgctgttttgacctccatagaagacaccgggaccgatccagcctccgcggattcgaatcccggccgggaacggtgcattggaacgcggattccccgtgccaagagtgacgtaagtaccgcctatagagtctataggcccacaaaaaatgctttcttcttttaatatacttttttgtttatcttatttctaatactttccctaatctctttctttcagggcaataatgatacaatgtatcatgcctctttgcaccattctaaagaataacagtgataatttctgggttaaggcaatagcaatatttctgcatataaatatttctgcatataaattgtaactgatgtaagaggtttcatattgctaatagcagctacaatccagctaccattctgcttttattttatggttgggataaggctggattattctgagtccaagctaggcccttttgctaatcatgttcatacctcttatcttcctcccacagctcctgggcaacgtgctggtctgtgtgctggcccatcactttggcaaagaattgggattcgaacatcggccgccaccatgaacgcaagtgaattccgaaggagagggaaggagatggtggattacgtggccaactacatggaaggcattgagggacgccaggtctaccctgacgtggagcccgggtacctgcggccgctgatccctgccgctgcccctcaggagccagacacgtttgaggacatcatcaacgacgttgagaagataatcatgcctggggtgacgcactggcacagcccctacttcttcgcctacttccccactgccagctcgtacccggccatgcttgcggacatgctgtgcggggccattggctgcatcggcttctcctgggcggcaagcccagcatgcacagagctggagactgtgatgatggactggctcgggaagatgctggaactaccaaaggcatttttgaatgagaaagctggagaagggggaggagtgatccagggaagtgccagtgaagccaccctggtggccctgctggccgctcggaccaaagtgatccatcggctgcaggcagcgtccccagagctcacacaggccgctatcatggagaagctggtggcttactcatccgatcaggcacactcctcagtggaaagagctgggttaattggtggagtgaaattaaaagccatcccctcagatggcaacttcgccatgcgtgcgtctgccctgcaggaagccctggagagagacaaagcggctggcctgattcctttctttatggttgccaccctggggaccacaacatgctgctcctttgacaatctcttagaagtcggtcctatctgcaacaaggaagacatatggctgcacgttgatgcagcctacgcaggcagtgcattcatctgccctgagttccggcaccttctgaatggagtggagtttgcagattcattcaactttaatccccacaaatggctattggtgaattttgactgttctgccatgtgggtgaaaaagagaacagacttaacgggagcctttagactggaccccacttacctgaagcacagccatcaggattcagggcttatcactgactaccggcattggcagataccactgggcagaagatttcgctctttgaaaatgtggtttgtatttaggatgtatggagtcaaaggactgcaggcttatatccgcaagcatgtccagctgtcccatgagtttgagtcactggtgcgccaggatccccgctttgaaatctgtgtggaagtcattctggggcttgtctgctttcggctaaagggttccaacaaagtgaatgaagctcttctgcaaagaataaacagtgccaaaaaaatccacttggttccatgtcacctcagggacaagtttgtcctgcgctttgccatctgttctcgcacggtggaatctgcccatgtgcagcgggcctgggaacacatcaaagagctggcggccgacgtgctgcgagcagagagggagtaggagtgaagccagctgcaggaatcaaaaattgaagagagatatatctgaaaactggaataagaagcaaataaatatcatcctgccttcatggaactcagctgtctgtggcttcccatgtctttctccaaagttatccagagggttgtgattttgtctgcttagtatctcatcaacaaagaaatattatttgctaattaaaaagttaatcttcatggccatagcttttattcattagctgtgatttttgttgattaaaacattatagattttcatgttcttgcagtcatcagaagtggtaggaaagcctcactgatatattttccagggcaatcaatgttcacgcaacttgaaattatatctgtggtcttcaaattgtcttttgtcatgtggctaaatgcctaataagctgctcgagagatctacgggtggcatccctgtgacccctccccagtgcctctcctggccctggaagttgccactccagtgcccaccagccttgtcctaataaaattaagttgcatcattttgtctgactaggtgtccttctataatattatggggtggaggggggtggtatggagcaaggggcaagttgggaagacaacctgtagggcctgcggggtctattgggaaccaagctggagtgcagtggcacaatcttggctcactgcaatctccgcctcctgggttcaagcgattctcctgcctcagcctcccgagttgttgggattccaggcatgcatgaccaggctcagctaatttttgtttttttggtagagacggggtttcaccatattggccaggctggtctccaactcctaatctcaggtgatctacccaccttggcctcccaaattgctgggattacaggcgtgaaccactgctcccttccctgtccttctgattttgtaggtaaccgtaaccccggaccacgtgcggaccgagcggccgctctagagcatggctacgtagataagtagcatggcgggttaatcattaactacaaggaacccctagtgatggagttggccactccctctctgcgcgctcgctcgctcactgaggccgggcgaccaaaggtcgcccgacgcccgggcggcctcagtgagcgagcgagcgcgcag

SEQ ID NO: 16 - DNA, 4079 bp, Artificial Sequence
  Description of Artificial Sequence: Synthetic polynucleotide
ctgcgcgctcgctcgctcactgaggccgcccgggcaaagcccgggcgtcgggcgacctttggtcgcccggcctcagtgagcgagcgagcgcgcagagagggagtggccaactccatcactaggggttccttgtagttaatgattaacccgccatgctacttatctacgtagccatgctctagagcggccgcaacgcgtaaacttcgtcgacgatctgcggccgcacgcgtggagctagttattaatagtaatcaattacggggtcattagttcatagcccatatatggagttccgcgttacataacttacggtaaatggcccgcctggctgaccgcccaacgacccccgcccattgacgtcaataatgacgtatgttcccatagtaacgtcaatagggactttccattgacgtcaatgggtggagtatttacggtaaactgcccacttggcagtacatcaagtgtatcatatgccaagtacgccccctattgacgtcaatgacggtaaatggcccgcctggcattatgcccagtacatgaccttatgggactttcctacttggcagtacatctacgtattagtcatcgctattaccatggtgatgcggttttggcagtacatcaatgggcgtggatagcggtttgactcacggggatttccaagtctccaccccattgacgtcaatgggagtttgttttgcaccaaaatcaacgggactttccaaaatgtcgtaacaactccgccccattgacgcaaatgggcggtaggcgtgtacggtgggaggtctatataagcagagctcgtttagtgaaccgtcagatcgcctggagacgccatccacgctgttttgacctccatagaagacaccgggaccgatccagcctccgcggattcgaatcccggccgggaacggtgcattggaacgcggattccccgtgccaagagtgacgtaagtaccgcctatagagtctataggcccacaaaaaatgctttcttcttttaatatacttttttgtttatcttatttctaatactttccctaatctctttctttcagggcaataatgatacaatgtatcatgcctctttgcaccattctaaagaataacagtgataatttctgggttaaggcaatagcaatatttctgcatataaatatttctgcatataaattgtaactgatgtaagaggtttcatattgctaatagcagctacaatccagctaccattctgcttttattttatggttgggataaggctggattattctgagtccaagctaggcccttttgctaatcatgttcatacctcttatcttcctcccacagctcctgggcaacgtgctggtctgtgtgctggcccatcactttggcaaagaattgggattcgaacatcgaattcgggcacgagggaggacagagagcaagtcactcccggctgcctttttcacctctgacagagcccagacaccatgaacgcaagtgaattccgaaggagagggaaggagatggtggattacgtggccaactacatggaaggcattgagggacgccaggtctaccctgacgtggagcccgggtacctgcggccgctgatccctgccgctgcccctcaggagccagacacgtttgaggacatcatcaacgacgttgagaagataatcatgcctggggtgacgcactggcacagcccctacttcttcgcctacttccccactgccagctcgtacccggccatgcttgcggacatgctgtgcggggccattggctgcatcggcttctcctgggcggcaagcccagcatgcacagagctggagactgtgatgatggactggctcgggaagatgctggaactaccaaaggcatttttgaatgagaaagctggagaagggggaggagtgatccagggaagtgccagtgaagccaccctggtggccctgctggccgctcggaccaaagtgatccatcggctgcaggcagcgtccccagagctcacacaggccgctatcatggagaagctggtggcttactcatccgatcaggcacactcctcagtggaaagagctgggttaattggtggagtgaaattaaaagccatcccctcagatggcaacttcgccatgcgtgcgtctgccctgcaggaagccctggagagagacaaagcggctggcctgattcctttctttatggttgccaccctggggaccacaacatgctgctcctttgacaatctcttagaagtcggtcctatctgcaacaaggaagacatatggctgcacgttgatgcagcctacgcaggcagtgcattcatctgccctgagttccggcaccttctgaatggagtggagtttgcagattcattcaactttaatccccacaaatggctattggtgaattttgactgttctgccatgtgggtgaaaaagagaacagacttaacgggagcctttagactggaccccacttacctgaagcacagccatcaggattcagggcttatcactgactaccggcattggcagataccactgggcagaagatttcgctctttgaaaatgtggtttgtatttaggatgtatggagtcaaaggactgcaggcttatatccgcaagcatgtccagctgtcccatgagtttgagtcactggtgcgccaggatccccgctttgaaatctgtgtggaagtcattctggggcttgtctgctttcggctaaagggttccaacaaagtgaatgaagctcttctgcaaagaataaacagtgccaaaaaaatccacttggttccatgtcacctcagggacaagtttgtcctgcgctttgccatctgttctcgcacggtggaatctgcccatgtgcagcgggcctgggaacacatcaaagagctggcggccgacgtgctgcgagcagagagggagtaggagtgaagccagctgcaggaatcaaaaattgaagagagatatatctgaaaactggaataagaagcaaataaatatcatcctgccttcatggaactcagctgtctgtggcttcccatgtctttctccaaagttatccagagggttgtgattttgtctgcttagtatctcatcaacaaagaaatattatttgctaattaaaaagttaatcttcatggccatagcttttattcattagctgtgatttttgttgattaaaacattatagattttcatgttcttgcagtcatcagaagtggtaggaaagcctcactgatatattttccagggcaatcaatgttcacgcaacttgaaattatatctgtggtcttcaaattgtcttttgtcatgtggctaaatgcctaataaacaattcaagtgaaatactaaaaaaaaaaaaaaaaaaaaaagctgctcgagagatctacgggtggcatccctgtgacccctccccagtgcctctcctggccctggaagttgccactccagtgcccaccagccttgtcctaataaaattaagttgcatcattttgtctgactaggtgtccttctataatattatggggtggaggggggtggtatggagcaaggggcaagttgggaagacaacctgtagggcctgcggggtctattgggaaccaagctggagtgcagtggcacaatcttggctcactgcaatctccgcctcctgggttcaagcgattctcctgcctcagcctcccgagttgttgggattccaggcatgcatgaccaggctcagctaatttttgtttttttggtagagacggggtttcaccatattggccaggctggtctccaactcctaatctcaggtgatctacccaccttggcctcccaaattgctgggattacaggcgtgaaccactgctcccttccctgtccttctgattttgtaggtaacgtaaccccggaccacgtgcggaccgagcggccgctctagagcatggctacgtagataagtagcatggcgggttaatcattaactacaaggaacccctagtgatggagttggccactccctctctgcgcgctcgctcgctcactgaggccgggcgaccaaaggtcgcccgacgcccgggcggcctcagtgagcgagcgagcgcgcag

SEQ ID NO: 17 - DNA, 3497 bp, Artificial Sequence
  Description of Artificial Sequence: Synthetic polynucleotide
cctgcaggcagctgcgcgctcgctcgctcactgaggccgcccgggcaaagcccgggcgtcgggcgacctttggtcgcccggcctcagtgagcgagcgagcgcgcagagagggagtggccaactccatcactaggggttcctgagtttaaacttcgtcgacgatctgcggccgcacgcgtggagctagttattaatagtaatcaattacggggtcattagttcatagcccatatatggagttccgcgttacataacttacggtaaatggcccgcctggctgaccgcccaacgacccccgcccattgacgtcaataatgacgtatgttcccatagtaacgtcaatagggactttccattgacgtcaatgggtggagtatttacggtaaactgcccacttggcagtacatcaagtgtatcatatgccaagtacgccccctattgacgtcaatgacggtaaatggcccgcctggcattatgcccagtacatgaccttatgggactttcctacttggcagtacatctacgtattagtcatcgctattaccatggtgatgcggttttggcagtacatcaatgggcgtggatagcggtttgactcacggggatttccaagtctccaccccattgacgtcaatgggagtttgttttgcaccaaaatcaacgggactttccaaaatgtcgtaacaactccgccccattgacgcaaatgggcggtaggcgtgtacggtgggaggtctatataagcagagctcgtttagtgaaccgtcagatcgcctggagacgccatccacgctgttttgacctccatagaagacaccgggaccgatccagcctccgcggattcgaatcccggccgggaacggtgcattggaacgcggattccccgtgccaagagtgacgtaagtaccgcctatagagtctataggcccacaaaaaatgctttcttcttttaatatacttttttgtttatcttatttctaatactttccctaatctctttctttcagggcaataatgatacaatgtatcatgcctctttgcaccattctaaagaataacagtgataatttctgggttaaggcaatagcaatatttctgcatataaatatttctgcatataaattgtaactgatgtaagaggtttcatattgctaatagcagctacaatccagctaccattctgcttttattttatggttgggataaggctggattattctgagtccaagctaggcccttttgctaatcatgttcatacctcttatcttcctcccacagctcctgggcaacgtgctggtctgtgtgctggcccatcactttggcaaagaattgggattcgaacatcggccgccaccatgaacgcaagtgaattccgaaggagagggaaggagatggtggattacgtggccaactacatggaaggcattgagggacgccaggtctaccctgacgtggagcccgggtacctgcggccgctgatccctgccgctgcccctcaggagccagacacgtttgaggacatcatcaacgacgttgagaagataatcatgcctggggtgacgcactggcacagcccctacttcttcgcctacttccccactgccagctcgtacccggccatgcttgcggacatgctgtgcggggccattggctgcatcggcttctcctgggcggcaagcccagcatgcacagagctggagactgtgatgatggactggctcgggaagatgctggaactaccaaaggcatttttgaatgagaaagctggagaagggggaggagtgatccagggaagtgccagtgaagccaccctggtggccctgctggccgctcggaccaaagtgatccatcggctgcaggcagcgtccccagagctcacacaggccgctatcatggagaagctggtggcttactcatccgatcaggcacactcctcagtggaaagagctgggttaattggtggagtgaaattaaaagccatcccctcagatggcaacttcgccatgcgtgcgtctgccctgcaggaagccctggagagagacaaagcggctggcctgattcctttctttatggttgccaccctggggaccacaacatgctgctcctttgacaatctcttagaagtcggtcctatctgcaacaaggaagacatatggctgcacgttgatgcagcctacgcaggcagtgcattcatctgccctgagttccggcaccttctgaatggagtggagtttgcagattcattcaactttaatccccacaaatggctattggtgaattttgactgttctgccatgtgggtgaaaaagagaacagacttaacgggagcctttagactggaccccacttacctgaagcacagccatcaggattcagggcttatcactgactaccggcattggcagataccactgggcagaagatttcgctctttgaaaatgtggtttgtatttaggatgtatggagtcaaaggactgcaggcttatatccgcaagcatgtccagctgtcccatgagtttgagtcactggtgcgccaggatccccgctttgaaatctgtgtggaagtcattctggggcttgtctgctttcggctaaagggttccaacaaagtgaatgaagctcttctgcaaagaataaacagtgccaaaaaaatccacttggttccatgtcacctcagggacaagtttgtcctgcgctttgccatctgttctcgcacggtggaatctgcccatgtgcagcgggcctgggaacacatcaaagagctggcggccgacgtgctgcgagcagagagggagtaggagtgagctgctcgagagatctacgggtggcatccctgtgacccctccccagtgcctctcctggccctggaagttgccactccagtgcccaccagccttgtcctaataaaattaagttgcatcattttgtctgactaggtgtccttctataatattatggggtggaggggggtggtatggagcaaggggcaagttgggaagacaacctgtagggcctgcggggtctattgggaaccaagctggagtgcagtggcacaatcttggctcactgcaatctccgcctcctgggttcaagcgattctcctgcctcagcctcccgagttgttgggattccaggcatgcatgaccaggctcagctaatttttgtttttttggtagagacggggtttcaccatattggccaggctggtctccaactcctaatctcaggtgatctacccaccttggcctcccaaattgctgggattacaggcgtgaaccactgctcccttccctgtccttctgattttgtaggtaaccacgtgcggaccgagcggccgcagttaattaagctcgcgaaggaacccctagtgatggagttggccactccctctctgcgcgctcgctcgctcactgaggccgggcgaccaaaggtcgcccgacgcccgggctttgcccgggcggcctcagtgagcgagcgagcgcgcagctgcctgcagg

SEQ ID NO: 18 - DNA, 3497 bp, Artificial Sequence; identical to SEQ ID NO: 17
  Description of Artificial Sequence: Synthetic polynucleotide

SEQ ID NO: 19 - DNA, 3491 bp, Artificial Sequence
  Description of Artificial Sequence: Synthetic polynucleotide
cctgcaggcagctgcgcgctcgctcgctcactgaggccgcccgggcaaagcccgggcgtcgggcgacctttggtcgcccggcctcagtgagcgagcgagcgcgcagagagggagtggccaactccatcactaggggttcctgagtttaaacttcgtcgacgatctgcggccgcacgcgtggagctagttattaatagtaatcaattacggggtcattagttcatagcccatatatggagttccgcgttacataacttacggtaaatggcccgcctggctgaccgcccaacgacccccgcccattgacgtcaataatgacgtatgttcccatagtaacgtcaatagggactttccattgacgtcaatgggtggagtatttacggtaaactgcccacttggcagtacatcaagtgtatcatatgccaagtacgccccctattgacgtcaatgacggtaaatggcccgcctggcattatgcccagtacatgaccttatgggactttcctacttggcagtacatctacgtattagtcatcgctattaccatggtgatgcggttttggcagtacatcaatgggcgtggatagcggtttgactcacggggatttccaagtctccaccccattgacgtcaatgggagtttgttttgcaccaaaatcaacgggactttccaaaatgtcgtaacaactccgccccattgacgcaaatgggcggtaggcgtgtacggtgggaggtctatataagcagagctcgtttagtgaaccgtcagatcgcctggagacgccatccacgctgttttgacctccatagaagacaccgggaccgatccagcctccgcggattcgaatcccggccgggaacggtgcattggaacgcggattccccgtgccaagagtgacgtaagtaccgcctatagagtctataggcccacaaaaaatgctttcttcttttaatatacttttttgtttatcttatttctaatactttccctaatctctttctttcagggcaataatgatacaatgtatcatgcctctttgcaccattctaaagaataacagtgataatttctgggttaaggcaatagcaatatttctgcatataaatatttctgcatataaattgtaactgatgtaagaggtttcatattgctaatagcagctacaatccagctaccattctgcttttattttatggttgggataaggctggattattctgagtccaagctaggcccttttgctaatcatgttcatacctcttatcttcctcccacagctcctgggcaacgtgctggtctgtgtgctggcccatcactttggcaaagaattgggattcgaacatcggccgccaccatgaacgccagcgagttcaggaggaggggcaaggagatggtggactacgtggccaactacatggagggcatcgagggcaggcaggtgtaccccgacgtggagcccggctacctgaggcccctgatccccgccgccgccccccaggagcccgacaccttcgaggacatcatcaacgacgtggagaagatcatcatgcccggcgtgacccactggcacagcccctacttcttcgcctacttccccaccgccagcagctaccccgccatgctggccgacatgctgtgcggcgccatcggctgcatcggcttcagctgggccgccagccccgcctgcaccgagctggagaccgtgatgatggactggctgggcaagatgctggagctgcccaaggccttcctgaacgagaaggccggcgagggcggcggcgtgatccagggcagcgccagcgaggccaccctggtggccctgctggccgccaggaccaaggtgatccacaggctgcaggccgccagccccgagctgacccaggccgccatcatggagaagctggtggcctacagcagcgaccaggcccacagcagcgtggagagggccggcctgatcggcggcgtgaagctgaaggccatccccagcgacggcaacttcgccatgagggccagcgccctgcaggaggccctggagagggacaaggccgccggcctgatccccttcttcatggtggccaccctgggcaccaccacctgctgcagcttcgacaacctgctggaggtgggccccatctgcaacaaggaggacatctggctgcacgtggacgccgcctacgccggcagcgccttcatctgccccgagttcaggcacctgctgaacggcgtggagttcgccgacagcttcaacttcaacccccacaagtggctgctggtgaacttcgactgcagcgccatgtgggtgaagaagaggaccgacctgaccggcgccttcaggctggaccccacctacctgaagcacagccaccaggacagcggcctgatcaccgactacaggcactggcagatccccctgggcaggaggttcaggagcctgaagatgtggttcgtgttcaggatgtacggcgtgaagggcctgcaggcctacatcaggaagcacgtgcagctgagccacgagttcgagagcctggtgaggcaggaccccaggttcgagatctgcgtggaggtgatcctgggcctggtgtgcttcaggctgaagggcagcaacaaggtgaacgaggccctgctgcagaggatcaacagcgccaagaagatccacctggtgccctgccacctgagggacaagttcgtgctgaggttcgccatctgcagcaggaccgtggagagcgcccacgtgcagagggcctgggagcacatcaaggagctggccgccgacgtgctgagggccgagagggagtgagctgctcgagagatctacgggtggcatccctgtgacccctccccagtgcctctcctggccctggaagttgccactccagtgcccaccagccttgtcctaataaaattaagttgcatcattttgtctgactaggtgtccttctataatattatggggtggaggggggtggtatggagcaaggggcaagttgggaagacaacctgtagggcctgcggggtctattgggaaccaagctggagtgcagtggcacaatcttggctcactgcaatctccgcctcctgggttcaagcgattctcctgcctcagcctcccgagttgttgggattccaggcatgcatgaccaggctcagctaatttttgtttttttggtagagacggggtttcaccatattggccaggctggtctccaactcctaatctcaggtgatctacccaccttggcctcccaaattgctgggattacaggcgtgaaccactgctcccttccctgtccttctgattttgtaggtaaccacgtgcggaccgagcggccgcagttaattaagctcgcgaaggaacccctagtgatggagttggccactccctctctgcgcgctcgctcgctcactgaggccgggcgaccaaaggtcgcccgacgcccgggctttgcccgggcggcctcagtgagcgagcgagcgcgcagctgcctgcagg

SEQ ID NO: 20 - DNA, 4003 bp, Artificial Sequence
  Description of Artificial Sequence: Synthetic polynucleotide
cctgcaggcagctgcgcgctcgctcgctcactgaggccgcccgggcaaagcccgggcgtcgggcgacctttggtcgcccggcctcagtgagcgagcgagcgcgcagagagggagtggccaactccatcactaggggttcctgagtttaaacttcgtcgacgatctgcggccgcacgcgtggagctagttattaatagtaatcaattacggggtcattagttcatagcccatatatggagttccgcgttacataacttacggtaaatggcccgcctggctgaccgcccaacgacccccgcccattgacgtcaataatgacgtatgttcccatagtaacgtcaatagggactttccattgacgtcaatgggtggagtatttacggtaaactgcccacttggcagtacatcaagtgtatcatatgccaagtacgccccctattgacgtcaatgacggtaaatggcccgcctggcattatgcccagtacatgaccttatgggactttcctacttggcagtacatctacgtattagtcatcgctattaccatggtgatgcggttttggcagtacatcaatgggcgtggatagcggtttgactcacggggatttccaagtctccaccccattgacgtcaatgggagtttgttttgcaccaaaatcaacgggactttccaaaatgtcgtaacaactccgccccattgacgcaaatgggcggtaggcgtgtacggtgggaggtctatataagcagagctcgtttagtgaaccgtcagatcgcctggagacgccatccacgctgttttgacctccatagaagacaccgggaccgatccagcctccgcggattcgaatcccggccgggaacggtgcattggaacgcggattccccgtgccaagagtgacgtaagtaccgcctatagagtctataggcccacaaaaaatgctttcttcttttaatatacttttttgtttatcttatttctaatactttccctaatctctttctttcagggcaataatgatacaatgtatcatgcctctttgcaccattctaaagaataacagtgataatttctgggttaaggcaatagcaatatttctgcatataaatatttctgcatataaattgtaactgatgtaagaggtttcatattgctaatagcagctacaatccagctaccattctgcttttattttatggttgggataaggctggattattctgagtccaagctaggcccttttgctaatcatgttcatacctcttatcttcctcccacagctcctgggcaacgtgctggtctgtgtgctggcccatcactttggcaaagaattgggattcgaacatcgaattcgggcacgagggaggacagagagcaagtcactcccggctgcctttttcacctctgacagagcccagacaccatgaacgcaagtgaattccgaaggagagggaaggagatggtggattacgtggccaactacatggaaggcattgagggacgccaggtctaccctgacgtggagcccgggtacctgcggccgctgatccctgccgctgcccctcaggagccagacacgtttgaggacatcatcaacgacgttgagaagataatcatgcctggggtgacgcactggcacagcccctacttcttcgcctacttccccactgccagctcgtacccggccatgcttgcggacatgctgtgcggggccattggctgcatcggcttctcctgggcggcaagcccagcatgcacagagctggagactgtgatgatggactggctcgggaagatgctggaactaccaaaggcatttttgaatgagaaagctggagaagggggaggagtgatccagggaagtgccagtgaagccaccctggtggccctgctggccgctcggaccaaagtgatccatcggctgcaggcagcgtccccagagctcacacaggccgctatcatggagaagctggtggcttactcatccgatcaggcacactcctcagtggaaagagctgggttaattggtggagtgaaattaaaagccatcccctcagatggcaacttcgccatgcgtgcgtctgccctgcaggaagccctggagagagacaaagcggctggcctgattcctttctttatggttgccaccctggggaccacaacatgctgctcctttgacaatctcttagaagtcggtcctatctgcaacaaggaagacatatggctgcacgttgatgcagcctacgcaggcagtgcattcatctgccctgagttccggcaccttctgaatggagtggagtttgcagattcattcaactttaatccccacaaatggctattggtgaattttgactgttctgccatgtgggtgaaaaagagaacagacttaacgggagcctttagactggaccccacttacctgaagcacagccatcaggattcagggcttatcactgactaccggcattggcagataccactgggcagaagatttcgctctttgaaaatgtggtttgtatttaggatgtatggagtcaaaggactgcaggcttatatccgcaagcatgtccagctgtcccatgagtttgagtcactggtgcgccaggatccccgctttgaaatctgtgtggaagtcattctggggcttgtctgctttcggctaaagggttccaacaaagtgaatgaagctcttctgcaaagaataaacagtgccaaaaaaatccacttggttccatgtcacctcagggacaagtttgtcctgcgctttgccatctgttctcgcacggtggaatctgcccatgtgcagcgggcctgggaacacatcaaagagctggcggccgacgtgctgcgagcagagagggagtaggagtgaagccagctgcaggaatcaaaaattgaagagagatatatctgaaaactggaataagaagcaaataaatatcatcctgccttcatggaactcagctgtctgtggcttcccatgtctttctccaaagttatccagagggttgtgattttgtctgcttagtatctcatcaacaaagaaatattatttgctaattaaaaagttaatcttcatggccatagcttttattcattagctgtgatttttgttgattaaaacattatagattttcatgttcttgcagtcatcagaagtggtaggaaagcctcactgatatattttccagggcaatcaatgttcacgcaacttgaaattatatctgtggtcttcaaattgtcttttgtcatgtggctaaatgcctaataaacaattcaagtgaaatactaaaaaaaaaaaaaaaaaaaaaagctgctcgagagatctacgggtggcatccctgtgacccctccccagtgcctctcctggccctggaagttgccactccagtgcccaccagccttgtcctaataaaattaagttgcatcattttgtctgactaggtgtccttctataatattatggggtggaggggggtggtatggagcaaggggcaagttgggaagacaacctgtagggcctgcggggtctattgggaaccaagctggagtgcagtggcacaatcttggctcactgcaatctccgcctcctgggttcaagcgattctcctgcctcagcctcccgagttgttgggattccaggcatgcatgaccaggctcagctaatttttgtttttttggtagagacggggtttcaccatattggccaggctggtctccaactcctaatctcaggtgatctacccaccttggcctcccaaattgctgggattacaggcgtgaaccactgctcccttccctgtccttctgattttgtaggtaaccacgtgcggaccgagcggccgcagttaattaagctcgcgaaggaacccctagtgatggagttggccactccctctctgcgcgctcgctcgctcactgaggccgggcgaccaaaggtcgcccgacgcccgggctttgcccgggcggcctcagtgagcgagcgagcgcgcagctgcctgcagg

SEQ ID NO: 21 - DNA, 3499 bp, Artificial Sequence
  Description of Artificial Sequence: Synthetic polynucleotide
ttggccactccctctctgcgcgctcgctcgctcactgaggccgggcgaccaaaggtcgcccgacgcccgggctttgcccgggcggcctcagtgagcgagcgagcgcgcagagagggagtggccaactccatcactaggggttcctgagtttaaacttcgtcgacgatctgcggccgcacgcgtggagctagttattaatagtaatcaattacggggtcattagttcatagcccatatatggagttccgcgttacataacttacggtaaatggcccgcctggctgaccgcccaacgacccccgcccattgacgtcaataatgacgtatgttcccatagtaacgtcaatagggactttccattgacgtcaatgggtggagtatttacggtaaactgcccacttggcagtacatcaagtgtatcatatgccaagtacgccccctattgacgtcaatgacggtaaatggcccgcctggcattatgcccagtacatgaccttatgggactttcctacttggcagtacatctacgtattagtcatcgctattaccatggtgatgcggttttggcagtacatcaatgggcgtggatagcggtttgactcacggggatttccaagtctccaccccattgacgtcaatgggagtttgttttgcaccaaaatcaacgggactttccaaaatgtcgtaacaactccgccccattgacgcaaatgggcggtaggcgtgtacggtgggaggtctatataagcagagctcgtttagtgaaccgtcagatcgcctggagacgccatccacgctgttttgacctccatagaagacaccgggaccgatccagcctccgcggattcgaatcccggccgggaacggtgcattggaacgcggattccccgtgccaagagtgacgtaagtaccgcctatagagtctataggcccacaaaaaatgctttcttcttttaatatacttttttgtttatcttatttctaatactttccctaatctctttctttcagggcaataatgatacaatgtatcatgcctctttgcaccattctaaagaataacagtgataatttctgggttaaggcaatagcaatatttctgcatataaatatttctgcatataaattgtaactgatgtaagaggtttcatattgctaatagcagctacaatccagctaccattctgcttttattttatggttgggataaggctggattattctgagtccaagctaggcccttttgctaatcatgttcatacctcttatcttcctcccacagctcctgggcaacgtgctggtctgtgtgctggcccatcactttggcaaagaattgggattcgaacatcggccgccaccatgaacgccagcgagttcaggaggaggggcaaggagatggtggactacgtggccaactacatggagggcatcgagggcaggcaggtgtaccccgacgtggagcccggctacctgaggcccctgatccccgccgccgccccccaggagcccgacaccttcgaggacatcatcaacgacgtggagaagatcatcatgcccggcgtgacccactggcacagcccctacttcttcgcctacttccccaccgccagcagctaccccgccatgctggccgacatgctgtgcggcgccatcggctgcatcggcttcagctgggccgccagccccgcctgcaccgagctggagaccgtgatgatggactggctgggcaagatgctggagctgcccaaggccttcctgaacgagaaggccggcgagggcggcggcgtgatccagggcagcgccagcgaggccaccctggtggccctgctggccgccaggaccaaggtgatccacaggctgcaggccgccagccccgagctgacccaggccgccatcatggagaagctggtggcctacagcagcgaccaggcccacagcagcgtggagagggccggcctgatcggcggcgtgaagctgaaggccatccccagcgacggcaacttcgccatgagggccagcgccctgcaggaggccctggagagggacaaggccgccggcctgatccccttcttcatggtggccaccctgggcaccaccacctgctgcagcttcgacaacctgctggaggtgggccccatctgcaacaaggaggacatctggctgcacgtggacgccgcctacgccggcagcgccttcatctgccccgagttcaggcacctgctgaacggcgtggagttcgccgacagcttcaacttcaacccccacaagtggctgctggtgaacttcgactgcagcgccatgtgggtgaagaagaggaccgacctgaccggcgccttcaggctggaccccacctacctgaagcacagccaccaggacagcggcctgatcaccgactacaggcactggcagatccccctgggcaggaggttcaggagcctgaagatgtggttcgtgttcaggatgtacggcgtgaagggcctgcaggcctacatcaggaagcacgtgcagctgagccacgagttcgagagcctggtgaggcaggaccccaggttcgagatctgcgtggaggtgatcctgggcctggtgtgcttcaggctgaagggcagcaacaaggtgaacgaggccctgctgcagaggatcaacagcgccaagaagatccacctggtgccctgccacctgagggacaagttcgtgctgaggttcgccatctgcagcaggaccgtggagagcgcccacgtgcagagggcctgggagcacatcaaggagctggccgccgacgtgctgagggccgagagggagtgagctgctcgagagatctacgggtggcatccctgtgacccctccccagtgcctctcctggccctggaagttgccactccagtgcccaccagccttgtcctaataaaattaagttgcatcattttgtctgactaggtgtccttctataatattatggggtggaggggggtggtatggagcaaggggcaagttgggaagacaacctgtagggcctgcggggtctattgggaaccaagctggagtgcagtggcacaatcttggctcactgcaatctccgcctcctgggttcaagcgattctcctgcctcagcctcccgagttgttgggattccaggcatgcatgaccaggctcagctaatttttgtttttttggtagagacggggtttcaccatattggccaggctggtctccaactcctaatctcaggtgatctacccaccttggcctcccaaattgctgggattacaggcgtgaaccactgctcccttccctgtccttctgattttgtaggtaaccacgtgcggaccgagcggccgcagttaattaagctcgcgaaggaacccctagtgatggagttggccactccctctctgcgcgctcgctcgctcactgaggccgggcgaccaaaggtcgcccgacgcccgggctttgcccgggcggcctcagtgagcgagcgagcgcgcagagagggagtggccaa

SEQ ID NO: 22 - DNA, 3896 bp, Artificial Sequence
  Description of Artificial Sequence: Synthetic polynucleotide
cctgcaggcagctgcgcgctcgctcgctcactgaggccgcccgggcaaagcccgggcgtcgggcgacctttggtcgcccggcctcagtgagcgagcgagcgcgcagagagggagtggccaactccatcactaggggttcctgagtttaaacttcgtcgacgatctgcggccgcacgcgtggagctagttattaatagtaatcaattacggggtcattagttcatagcccatatatggagttccgcgttacataacttacggtaaatggcccgcctggctgaccgcccaacgacccccgcccattgacgtcaataatgacgtatgttcccatagtaacgtcaatagggactttccattgacgtcaatgggtggagtatttacggtaaactgcccacttggcagtacatcaagtgtatcatatgccaagtacgccccctattgacgtcaatgacggtaaatggcccgcctggcattatgcccagtacatgaccttatgggactttcctacttggcagtacatctacgtattagtcatcgctattaccatggtgatgcggttttggcagtacatcaatgggcgtggatagcggtttgactcacggggatttccaagtctccaccccattgacgtcaatgggagtttgttttgcaccaaaatcaacgggactttccaaaatgtcgtaacaactccgccccattgacgcaaatgggcggtaggcgtgtacggtgggaggtctatataagcagagctcgtttagtgaaccgtcagatcgcctggagacgccatccacgctgttttgacctccatagaagacaccgggaccgatccagcctccgcggattcgaatcccggccgggaacggtgcattggaacgcggattccccgtgccaagagtgacgtaagtaccgcctatagagtctataggcccacaaaaaatgctttcttcttttaatatacttttttgtttatcttatttctaatactttccctaatctctttctttcagggcaataatgatacaatgtatcatgcctctttgcaccattctaaagaataacagtgataatttctgggttaaggcaatagcaatatttctgcatataaatatttctgcatataaattgtaactgatgtaagaggtttcatattgctaatagcagctacaatccagctaccattctgcttttattttatggttgggataaggctggattattctgagtccaagctaggcccttttgctaatcatgttcatacctcttatcttcctcccacagctcctgggcaacgtgctggtctgtgtgctggcccatcactttggcaaagaattgggattcgaacatcggccgccaccatgaacgcaagtgaattccgaaggagagggaaggagatggtggattacgtggccaactacatggaaggcattgagggacgccaggtctaccctgacgtggagcccgggtacctgcggccgctgatccctgccgctgcccctcaggagccagacacgtttgaggacatcatcaacgacgttgagaagataatcatgcctggggtgacgcactggcacagcccctacttcttcgcctacttccccactgccagctcgtacccggccatgcttgcggacatgctgtgcggggccattggctgcatcggcttctcctgggcggcaagcccagcatgcacagagctggagactgtgatgatggactggctcgggaagatgctggaactaccaaaggcatttttgaatgagaaagctggagaagggggaggagtgatccagggaagtgccagtgaagccaccctggtggccctgctggccgctcggaccaaagtgatccatcggctgcaggcagcgtccccagagctcacacaggccgctatcatggagaagctggtggcttactcatccgatcaggcacactcctcagtggaaagagctgggttaattggtggagtgaaattaaaagccatcccctcagatggcaacttcgccatgcgtgcgtctgccctgcaggaagccctggagagagacaaagcggctggcctgattcctttctttatggttgccaccctggggaccacaacatgctgctcctttgacaatctcttagaagtcggtcctatctgcaacaaggaagacatatggctgcacgttgatgcagcctacgcaggcagtgcattcatctgccctgagttccggcaccttctgaatggagtggagtttgcagattcattcaactttaatccccacaaatggctattggtgaattttgactgttctgccatgtgggtgaaaaagagaacagacttaacgggagcctttagactggaccccacttacctgaagcacagccatcaggattcagggcttatcactgactaccggcattggcagataccactgggcagaagatttcgctctttgaaaatgtggtttgtatttaggatgtatggagtcaaaggactgcaggcttatatccgcaagcatgtccagctgtcccatgagtttgagtcactggtgcgccaggatccccgctttgaaatctgtgtggaagtcattctggggcttgtctgctttcggctaaagggttccaacaaagtgaatgaagctcttctgcaaagaataaacagtgccaaaaaaatccacttggttccatgtcacctcagggacaagtttgtcctgcgctttgccatctgttctcgcacggtggaatctgcccatgtgcagcgggcctgggaacacatcaaagagctggcggccgacgtgctgcgagcagagagggagtaggagtgaagccagctgcaggaatcaaaaattgaagagagatatatctgaaaactggaataagaagcaaataaatatcatcctgccttcatggaactcagctgtctgtggcttcccatgtctttctccaaagttatccagagggttgtgattttgtctgcttagtatctcatcaacaaagaaatattatttgctaattaaaaagttaatcttcatggccatagcttttattcattagctgtgatttttgttgattaaaacattatagattttcatgttcttgcagtcatcagaagtggtaggaaagcctcactgatatattttccagggcaatcaatgttcacgcaacttgaaattatatctgtggtcttcaaattgtcttttgtcatgtggctaaatgcctaataagctgctcgagagatctacgggtggcatccctgtgacccctccccagtgcctctcctggccctggaagttgccactccagtgcccaccagccttgtcctaataaaattaagttgcatcattttgtctgactaggtgtccttctataatattatggggtggaggggggtggtatggagcaaggggcaagttgggaagacaacctgtagggcctgcggggtctattgggaaccaagctggagtgcagtggcacaatcttggctcactgcaatctccgcctcctgggttcaagcgattctcctgcctcagcctcccgagttgttgggattccaggcatgcatgaccaggctcagctaatttttgtttttttggtagagacggggtttcaccatattggccaggctggtctccaactcctaatctcaggtgatctacccaccttggcctcccaaattgctgggattacaggcgtgaaccactgctcccttccctgtccttctgattttgtaggtaaccacgtgcggaccgagcggccgcagttaattaagctcgcgaaggaacccctagtgatggagttggccactccctctctgcgcgctcgctcgctcactgaggccgggcgaccaaaggtcgcccgacgcccgggctttgcccgggcggcctcagtgagcgagcgagcgcgcagctgcctgcagg

SEQ ID NO: 23 - DNA, 3475 bp, Artificial Sequence
  Description of Artificial Sequence: Synthetic polynucleotide
cagctgcgcgctcgctcgctcactgaggccgcccgggcaaagcccgggcgtcgggcgacctttggtcgcccggcctcagtgagcgagcgagcgcgcagagagggagtggccaactccatcactaggggttgagtttaaacttcgtcgacgatctgcggccgcacgcgtggagctagttattaatagtaatcaattacggggtcattagttcatagcccatatatggagttccgcgttacataacttacggtaaatggcccgcctggctgaccgcccaacgacccccgcccattgacgtcaataatgacgtatgttcccatagtaacgtcaatagggactttccattgacgtcaatgggtggagtatttacggtaaactgcccacttggcagtacatcaagtgtatcatatgccaagtacgccccctattgacgtcaatgacggtaaatggcccgcctggcattatgcccagtacatgaccttatgggactttcctacttggcagtacatctacgtattagtcatcgctattaccatggtgatgcggttttggcagtacatcaatgggcgtggatagcggtttgactcacggggatttccaagtctccaccccattgacgtcaatgggagtttgttttgcaccaaaatcaacgggactttccaaaatgtcgtaacaactccgccccattgacgcaaatgggcggtaggcgtgtacggtgggaggtctatataagcagagctcgtttagtgaaccgtcagatcgcctggagacgccatccacgctgttttgacctccatagaagacaccgggaccgatccagcctccgcggattcgaatcccggccgggaacggtgcattggaacgcggattccccgtgccaagagtgacgtaagtaccgcctatagagtctataggcccacaaaaaatgctttcttcttttaatatacttttttgtttatcttatttctaatactttccctaatctctttctttcagggcaataatgatacaatgtatcatgcctctttgcaccattctaaagaataacagtgataatttctgggttaaggcaatagcaatatttctgcatataaatatttctgcatataaattgtaactgatgtaagaggtttcatattgctaatagcagctacaatccagctaccattctgcttttattttatggttgggataaggctggattattctgagtccaagctaggcccttttgctaatcatgttcatacctcttatcttcctcccacagctcctgggcaacgtgctggtctgtgtgctggcccatcactttggcaaagaattgggattcgaacatcggccgccaccatgaacgcaagtgaattccgaaggagagggaaggagatggtggattacgtggccaactacatggaaggcattgagggacgccaggtctaccctgacgtggagcccgggtacctgcggccgctgatccctgccgctgcccctcaggagccagacacgtttgaggacatcatcaacgacgttgagaagataatcatgcctggggtgacgcactggcacagcccctacttcttcgcctacttccccactgccagctcgtacccggccatgcttgcggacatgctgtgcggggccattggctgcatcggcttctcctgggcggcaagcccagcatgcacagagctggagactgtgatgatggactggctcgggaagatgctggaactaccaaaggcatttttgaatgagaaagctggagaagggggaggagtgatccagggaagtgccagtgaagccaccctggtggccctgctggccgctcggaccaaagtgatccatcggctgcaggcagcgtccccagagctcacacaggccgctatcatggagaagctggtggcttactcatccgatcaggcacactcctcagtggaaagagctgggttaattggtggagtgaaattaaaagccatcccctcagatggcaacttcgccatgcgtgcgtctgccctgcaggaagccctggagagagacaaagcggctggcctgattcctttctttatggttgccaccctggggaccacaacatgctgctcctttgacaatctcttagaagtcggtcctatctgcaacaaggaagacatatggctgcacgttgatgcagcctacgcaggcagtgcattcatctgccctgagttccggcaccttctgaatggagtggagtttgcagattcattcaactttaatccccacaaatggctattggtgaattttgactgttctgccatgtgggtgaaaaagagaacagacttaacgggagcctttagactggaccccacttacctgaagcacagccatcaggattcagggcttatcactgactaccggcattggcagataccactgggcagaagatttcgctctttgaaaatgtggtttgtatttaggatgtatggagtcaaaggactgcaggcttatatccgcaagcatgtccagctgtcccatgagtttgagtcactggtgcgccaggatccccgctttgaaatctgtgtggaagtcattctggggcttgtctgctttcggctaaagggttccaacaaagtgaatgaagctcttctgcaaagaataaacagtgccaaaaaaatccacttggttccatgtcacctcagggacaagtttgtcctgcgctttgccatctgttctcgcacggtggaatctgcccatgtgcagcgggcctgggaacacatcaaagagctggcggccgacgtgctgcgagcagagagggagtaggagtgagctgctcgagagatctacgggtggcatccctgtgacccctccccagtgcctctcctggccctggaagttgccactccagtgcccaccagccttgtcctaataaaattaagttgcatcattttgtctgactaggtgtccttctataatattatggggtggaggggggtggtatggagcaaggggcaagttgggaagacaacctgtagggcctgcggggtctattgggaaccaagctggagtgcagtggcacaatcttggctcactgcaatctccgcctcctgggttcaagcgattctcctgcctcagcctcccgagttgttgggattccaggcatgcatgaccaggctcagctaatttttgtttttttggtagagacggggtttcaccatattggccaggctggtctccaactcctaatctcaggtgatctacccaccttggcctcccaaattgctgggattacaggcgtgaaccactgctcccttccctgtccttctgattttgtaggtaaccacgtgcggaccgagcggccgcagttaattaagctcgcgaaacccctagtgatggagttggccactccctctctgcgcgctcgctcgctcactgaggccgggcgaccaaaggtcgcccgacgcccgggctttgcccgggcggcctcagtgagcgagcgagcgcgcagctg

SEQ ID NO: 24 - DNA, 1449 bp, Artificial Sequence
  Description of Artificial Sequence: Synthetic polynucleotide
atgaacgcaagtgaattccgaaggagagggaaggagatggtggattacgtggccaactacatggaaggcattgagggacgccaggtctaccctgacgtggagcccgggtacctgcggccgctgatccctgccgctgcccctcaggagccagacacgtttgaggacatcatcaacgacgttgagaagataatcatgcctggggtgacgcactggcacagcccctacttcttcgcctacttccccactgccagctcgtacccggccatgcttgcggacatgctgtgcggggccattggctgcatcggcttctcctgggcggcaagcccagcatgcacagagctggagactgtgatgatggactggctcgggaagatgctggaactaccaaaggcatttttgaatgagaaagctggagaagggggaggagtgatccagggaagtgccagtgaagccaccctggtggccctgctggccgctcggaccaaagtgatccatcggctgcaggcagcgtccccagagctcacacaggccgctatcatggagaagctggtggcttactcatccgatcaggcacactcctcagtggaaagagctgggttaattggtggagtgaaattaaaagccatcccctcagatggcaacttcgccatgcgtgcgtctgccctgcaggaagccctggagagagacaaagcggctggcctgattcctttctttatggttgccaccctggggaccacaacatgctgctcctttgacaatctcttagaagtcggtcctatctgcaacaaggaagacatatggctgcacgttgatgcagcctacgcaggcagtgcattcatctgccctgagttccggcaccttctgaatggagtggagtttgcagattcattcaactttaatccccacaaatggctattggtgaattttgactgttctgccatgtgggtgaaaaagagaacagacttaacgggagcctttagactggaccccacttacctgaagcacagccatcaggattcagggcttatcactgactaccggcattggcagataccactgggcagaagatttcgctctttgaaaatgtggtttgtatttaggatgtatggagtcaaaggactgcaggcttatatccgcaagcatgtccagctgtcccatgagtttgagtcactggtgcgccaggatccccgctttgaaatctgtgtggaagtcattctggggcttgtctgctttcggctaaagggttccaacaaagtgaatgaagctcttctgcaaagaataaacagtgccaaaaaaatccacttggttccatgtcacctcagggacaagtttgtcctgcgctttgccatctgttctcgcacggtggaatctgcccatgtgcagcgggcctgggaacacatcaaagagctggcggccgacgtgctgcgagcagagagggagtaggagtga

SEQ ID NO: 25 - DNA, 2211 bp, Adeno-associated virus 1
atggctgccgatggttatcttccagattggctcgaggacaacctctctgagggcattcgcgagtggtgggacttgaaacctggagccccgaagcccaaagccaaccagcaaaagcaggacgacggccggggtctggtgcttcctggctacaagtacctcggacccttcaacggactcgacaagggggagcccgtcaacgcggcggacgcagcggccctcgagcacgacaaggcctacgaccagcagctcaaagcgggtgacaatccgtacctgcggtataaccacgccgacgccgagtttcaggagcgtctgcaagaagatacgtcttttgggggcaacctcgggcgagcagtcttccaggccaagaagcgggttctcgaacctctcggtctggttgaggaaggcgctaagacggctcctggaaagaaacgtccggtagagcagtcgccacaagagccagactcctcctcgggcatcggcaagacaggccagcagcccgctaaaaagagactcaattttggtcagactggcgactcagagtcagtccccgatccacaacctctcggagaacctccagcaacccccgctgctgtgggacctactacaatggcttcaggcggtggcgcaccaatggcagacaataacgaaggcgccgacggagtgggtaatgcctcaggaaattggcattgcgattccacatggctgggcgacagagtcatcaccaccagcacccgcacctgggccttgcccacctacaataaccacctctacaagcaaatctccagtgcttcaacgggggccagcaacgacaaccactacttcggctacagcaccccctgggggtattttgatttcaacagattccactgccacttttcaccacgtgactggcagcgactcatcaacaacaattggggattccggcccaagagactcaacttcaaactcttcaacatccaagtcaaggaggtcacgacgaatgatggcgtcacaaccatcgctaataaccttaccagcacggttcaagtcttctcggactcggagtaccagcttccgtacgtcctcggctctgcgcaccagggctgcctccctccgttcccggcggacgtgttcatgattccgcaatacggctacctgacgctcaacaatggcagccaagccgtgggacgttcatccttttactgcctggaatatttcccttctcagatgctgagaacgggcaacaactttaccttcagctacacctttgaggaagtgcctttccacagcagctacgcgcacagccagagcctggaccggctgatgaatcctctcatcgaccaatacctgtattacctgaacagaactcaaaatcagtccggaagtgcccaaaacaaggacttgctgtttagccgtgggtctccagctggcatgtctgttcagcccaaaaactggctacctggaccctgttatcggcagcagcgcgtttctaaaacaaaaacagacaacaacaacagcaattttacctggactggtgcttcaaaatataacctcaatgggcgtgaatccatcatcaaccctggcactgctatggcctcacacaaagacgacgaagacaagttctttcccatgagcggtgtcatgatttttggaaaagagagcgccggagcttcaaacactgcattggacaatgtcatgattacagacgaagaggaaattaaagccactaaccctgtggccaccgaaagatttgggaccgtggcagtcaatttccagagcagcagcacagaccctgcgaccggagatgtgcatgctatgggagcattacctggcatggtgtggcaagatagagacgtgtacctgcagggtcccatttgggccaaaattcctcacacagatggacactttcacccgtctcctcttatgggcggctttggactcaagaacccgcctcctcagatcctcatcaaaaacacgcctgttcctgcgaatcctccggcggagttttcagctacaaagtttgcttcattcatcacccaatactccacaggacaagtgagtgtggaaattgaatgggagctgcagaaagaaaacagcaagcgctggaatcccgaagtgcagtacacatccaattatgcaaaatctgccaacgttgattttactgtggacaacaatggactttatactgagcctcgccccattggcacccgttaccttacccgtcccctgtaa

SEQ ID NO: 26 - protein, 736 aa, Adeno-associated virus 1
MAADGYLPDWLEDNLSEGIREWWDLKPGAPKPKANQQKQDDGRGLVLPGYKYLGPFNGLDKGEPVNAADAAALEHDKAYDQQLKAGDNPYLRYNHADAEFQERLQEDTSFGGNLGRAVFQAKKRVLEPLGLVEEGAKTAPGKKRPVEQSPQEPDSSSGIGKTGQQPAKKRLNFGQTGDSESVPDPQPLGEPPATPAAVGPTTMASGGGAPMADNNEGADGVGNASGNWHCDSTWLGDRVITTSTRTWALPTYNNHLYKQISSASTGASNDNHYFGYSTPWGYFDFNRFHCHFSPRDWQRLINNNWGFRPKRLNFKLFNIQVKEVTTNDGVTTIANNLTSTVQVFSDSEYQLPYVLGSAHQGCLPPFPADVFMIPQYGYLTLNNGSQAVGRSSFYCLEYFPSQMLRTGNNFTFSYTFEEVPFHSSYAHSQSLDRLMNPLIDQYLYYLNRTQNQSGSAQNKDLLFSRGSPAGMSVQPKNWLPGPCYRQQRVSKTKTDNNNSNFTWTGASKYNLNGRESIINPGTAMASHKDDEDKFFPMSGVMIFGKESAGASNTALDNVMITDEEEIKATNPVATERFGTVAVNFQSSSTDPATGDVHAMGALPGMVWQDRDVYLQGPIWAKIPHTDGHFHPSPLMGGFGLKNPPPQILIKNTPVPANPPAEFSATKFASFITQYSTGQVSVEIEWELQKENSKRWNPEVQYTSNYAKSANVDFTVDNNGLYTEPRPIGTRYLTRPL

SEQ ID NO: 27 - DNA, 4718 bp, Adeno-associated virus 1
ttgcccactccctctctgcgcgctcgctcgctcggtggggcctgcggaccaaaggtccgcagacggcagagctctgctctgccggccccaccgagcgagcgagcgcgcagagagggagtgggcaactccatcactaggggtaatcgcgaagcgcctcccacgctgccgcgtcagcgctgacgtaaattacgtcataggggagtggtcctgtattagctgtcacgtgagtgcttttgcgacattttgcgacaccacgtggccatttagggtatatatggccgagtgagcgagcaggatctccattttgaccgcgaaatttgaacgagcagcagccatgccgggcttctacgagatcgtgatcaaggtgccgagcgacctggacgagcacctgccgggcatttctgactcgtttgtgagctgggtggccgagaaggaatgggagctgcccccggattctgacatggatctgaatctgattgagcaggcacccctgaccgtggccgagaagctgcagcgcgacttcctggtccaatggcgccgcgtgagtaaggccccggaggccctcttctttgttcagttcgagaagggcgagtcctacttccacctccatattctggtggagaccacgggggtcaaatccatggtgctgggccgcttcctgagtcagattagggacaagctggtgcagaccatctaccgcgggatcgagccgaccctgcccaactggttcgcggtgaccaagacgcgtaatggcgccggaggggggaacaaggtggtggacgagtgctacatccccaactacctcctgcccaagactcagcccgagctgcagtgggcgtggactaacatggaggagtatataagcgcctgtttgaacctggccgagcgcaaacggctcgtggcgcagcacctgacccacgtcagccagacccaggagcagaacaaggagaatctgaaccccaattctgacgcgcctgtcatccggtcaaaaacctccgcgcgctacatggagctggtcgggtggctggtggaccggggcatcacctccgagaagcagtggatccaggaggaccaggcctcgtacatctccttcaacgccgcttccaactcgcggtcccagatcaaggccgctctggacaatgccggcaagatcatggcgctgaccaaatccgcgcccgactacctggtaggccccgctccgcccgcggacattaaaaccaaccgcatctaccgcatcctggagctgaacggctacgaacctgcctacgccggctccgtctttctcggctgggcccagaaaaggttcgggaagcgcaacaccatctggctgtttgggccggccaccacgggcaagaccaacatcgcggaagccatcgcccacgccgtgcccttctacggctgcgtcaactggaccaatgagaactttcccttcaatgattgcgtcgacaagatggtgatctggtgggaggagggcaagatgacggccaaggtcgtggagtccgccaaggccattctcggcggcagcaaggtgcgcgtggaccaaaagtgcaagtcgtccgcccagatcgaccccacccccgtgatcgtcacctccaacaccaacatgtgcgccgtgattgacgggaacagcaccaccttcgagcaccagcagccgttgcaggaccggatgttcaaatttgaactcacccgccgtctggagcatgactttggcaaggtgacaaagcaggaagtcaaagagttcttccgctgggcgcaggatcacgtgaccgaggtggcgcatgagttctacgtcagaaagggtggagccaacaaaagacccgcccccgatgacgcggataaaagcgagcccaagcgggcctgcccctcagtcgcggatccatcgacgtcagacgcggaaggagctccggtggactttgccgacaggtaccaaaacaaatgttctcgtcacgcgggcatgcttcagatgctgtttccctgcaagacatgcgagagaatgaatcagaatttcaacatttgcttcacgcacgggacgagagactgttcagagtgcttccccggcgtgtcagaatctcaaccggtcgtcagaaagaggacgtatcggaaactctgtgccattcatcatctgctggggcgggctcccgagattgcttgctcggcctgcgatctggtcaacgtggacctggatgactgtgtttctgagcaataaatgacttaaaccaggtatggctgccgatggttatcttccagattggctcgaggacaacctctctgagggcattcgcgagtggtgggacttgaaacctggagccccgaagcccaaagccaaccagcaaaagcaggacgacggccggggtctggtgcttcctggctacaagtacctcggacccttcaacggactcgacaagggggagcccgtcaacgcggcggacgcagcggccctcgagcacgacaaggcctacgaccagcagctcaaagcgggtgacaatccgtacctgcggtataaccacgccgacgccgagtttcaggagcgtctgcaagaagatacgtcttttgggggcaacctcgggcgagcagtcttccaggccaagaagcgggttctcgaacctctcggtctggttgaggaaggcgctaagacggctcctggaaagaaacgtccggtagagcagtcgccacaagagccagactcctcctcgggcatcggcaagacaggccagcagcccgctaaaaagagactcaattttggtcagactggcgactcagagtcagtccccgatccacaacctctcggagaacctccagcaacccccgctgctgtgggacctactacaatggcttcaggcggtggcgcaccaatggcagacaataacgaaggcgccgacggagtgggtaatgcctcaggaaattggcattgcgattccacatggctgggcgacagagtcatcaccaccagcacccgcacctgggccttgcccacctacaataaccacctctacaagcaaatctccagtgcttcaacgggggccagcaacgacaaccactacttcggctacagcaccccctgggggtattttgatttcaacagattccactgccacttttcaccacgtgactggcagcgactcatcaacaacaattggggattccggcccaagagactcaacttcaaactcttcaacatccaagtcaaggaggtcacgacgaatgatggcgtcacaaccatcgctaataaccttaccagcacggttcaagtcttctcggactcggagtaccagcttccgtacgtcctcggctctgcgcaccagggctgcctccctccgttcccggcggacgtgttcatgattccgcaatacggctacctgacgctcaacaatggcagccaagccgtgggacgttcatccttttactgcctggaatatttcccttctcagatgctgagaacgggcaacaactttaccttcagctacacctttgaggaagtgcctttccacagcagctacgcgcacagccagagcctggaccggctgatgaatcctctcatcgaccaatacctgtattacctgaacagaactcaaaatcagtccggaagtgcccaaaacaaggacttgctgtttagccgtgggtctccagctggcatgtctgttcagcccaaaaactggctacctggaccctgttatcggcagcagcgcgtttctaaaacaaaaacagacaacaacaacagcaattttacctggactggtgcttcaaaatataacctcaatgggcgtgaatccatcatcaaccctggcactgctatggcctcacacaaagacgacgaagacaagttctttcccatgagcggtgtcatgatttttggaaaagagagcgccggagcttcaaacactgcattggacaatgtcatgattacagacgaagaggaaattaaagccactaaccctgtggccaccgaaagatttgggaccgtggcagtcaatttccagagcagcagcacagaccctgcgaccggagatgtgcatgctatgggagcattacctggcatggtgtggcaagatagagacgtgtacctgcagggtcccatttgggccaaaattcctcacacagatggacactttcacccgtctcctcttatgggcggctttggactcaagaacccgcctcctcagatcctcatcaaaaacacgcctgttcctgcgaatcctccggcggagttttcagctacaaagtttgcttcattcatcacccaatactccacaggacaagtgagtgtggaaattgaatgggagctgcagaaagaaaacagcaagcgctggaatcccgaagtgcagtacacatccaattatgcaaaatctgccaacgttgattttactgtggacaacaatggactttatactgagcctcgccccattggcacccgttaccttacccgtcccctgtaattacgtgttaatcaataaaccggttgattcgtttcagttgaactttggtctcctgtccttcttatcttatcggttaccatggttatagcttacacattaactgcttggttgcgcttcgcgataaaagacttacgtcatcgggttacccctagtgatggagttgcccactccctctctgcgcgctcgctcgctcggtggggcctgcggaccaaaggtccgcagacggcagagctctgctctgccggccccaccgagcgagcgagcgcgcagagagggagtgggcaa

SEQ ID NO: 28 - DNA, 3131 bp, Adeno-associated virus
gcggccgcgaattcgcccttggctgcgtcaactggaccaatgagaactttcccttcaatgattgcgtcgacaagatggtgatctggtgggaggagggcaagatgacggccaaggtcgtggagtccgccaaggccattctcggcggcagcaaggtgcgcgtggaccaaaagtgcaagtcgtccgcccagatcgaccccacccccgtgatcgtcacctccaacaccaacatgtgcgccgtgattgacgggaacagcaccaccttcgagcaccagcagcctctccaggaccggatgtttaagttcgaactcacccgccgtctggagcacgactttggcaaggtgacaaagcaggaagtcaaagagttcttccgctgggccagtgatcacgtgaccgaggtggcgcatgagttttacgtcagaaagggcggagccagcaaaagacccgcccccgatgacgcggataaaagcgagcccaagcgggcctgcccctcagtcgcggatccatcgacgtcagacgcggaaggagctccggtggactttgccgacaggtaccaaaacaaatgttctcgtcacgcgggcatgcttcagatgctgtttccctgcaaaacgtgcgagagaatgaatcggaatttcaacatttgcttcacacacggggtcagagactgctcagagtgtttccccggcgtgtcagaatctcaaccggtcgtcagaaagaggacgtatcggaaactccgtgcgattcatcatctgctggggcgggctcccgagattgcttgctcggcctgcgatctggtcaacgtggacctggatgactgtgtttctgagcaataaatgacttaaaccaggtatggctgccgatggttatcttccagattggctcgaggacaacctctctgagggcattcgcgagtggtgggcgctgaaacctggagccccgaagcccaaagccaaccagcaaaagcaggacgacggccggggtctggtgcttcctggctacaagtacctcggacccttcaacggactcgacaagggggagcccgtcaacgcggcggacgcagcggccctcgagcacgacaaggcttacgaccagcagctgcaggcgggtgacaatccgtacctgcggtataaccacgccgacgccgagtttcaggagcgtctgcaagaagatacgtcttttgggggcaacctcgggcgagcagtcttccaggccaagaagcgggttctcgaacctctcggtctggttgaggaaggcgctaagacggctcctggaaagaagagaccggtagagccatcaccccagcgttctccagactcctctacgggcatcggcaagaaaggccaacagcccgccagaaaaagactcaattttggtcagactggcgactcagagtcagttccagaccctcaacctctcggagaacctccagcagcgccctctggtgtgggacctaatacaatggctgcaggcggtggcgcaccaatggcagacaataacgaaggcgccgacggagtgggtagttcctcgggaaattggcattgcgattccacatggctgggcgacagagtcatcaccaccagcacccgaacctgggccctgcccacctacaacaaccacctctacaagcaaatctccaacgggacatcgggaggagccaccaacgacaacacctacttcggctacagcaccccctgggggtattttgactttaacagattccactgccacctttcaccacgtgactggcagcgactcatcaacaacaactggggattccgacccaagagactcagcttcaagctcttcaacatccaggtcaaggaggtcacgcagaatgaaggcaccaagaccatcgccaataacctcaccagcaccatccaggtgtttacggactcggagtaccagctgccgtacgttctcggctctgtccaccagggctgcctgcctccgttcccggcggacgtgttcatgattccccagtacggctacctaacactcaacaacggtagtcaggccgtgggacgctcctccttctactgcctggaatactttccttcgcagatgctgagaaccggcaacaacttccagtttacttacaccttcgaggacgtgcctttccacagcagctacgcccacagctagagcttggaccggctgatgaatcctctgattgaccagtacctgtactacttgtctcggactcaaacaacaggaggcacggcaaatacgcagactctgggcttcagccaaggtgggcctaatacaatggccaatcaggcaaagaactggctgccaggaccctgttaccgccaacaacgcgtctcaacgacaaccgggcaaaacaacaatagcaactttgcctggactgctgggaccaaataccatctgaatggaagaaattcattggctaatcctggcatcgctatggcaacacacaaagacgacgaggagcgtttttttcccagtaacgggatcctgatttttggcaaacaaaatgctgccagagacaatgcggattacagcgatgtcatgctcaccagcgaggaagaaatcaaaaccactaaccctgtggctacagaggaatacggtatcgtggcagataacttgcagcagcaaaacacggctcctcaaattggaactgtcaacagccagggggccttacccggtatggtctggcagaaccgggacgtgtacctgcagggtcccatctgggccaagattcctcacacggacggcaacttccacccgtctccgctgatgggcggctttggcctgaaacatcctccgcctcagatcctgatcaagaacacgcctgtacctgcggatcctccgaccaccttcaaccagtcaaagctgaactctttcatcacgcaatacagcaccggacaggtcagcgtggaaattgaatgggagctgcagaaggaaaacagcaagcgctggaaccccgagatccagtacacctccaactactacaaatctataagtgtggactttgctgttaatacagaaggcgtgtactctgaaccccgccccattggcacccgttacctcacccgtaatctgtaattgcctgttaatcaataaaccggttgattcgtttcagttgaactttggtctctgcgaagggcgaattc

SEQ ID NO: 29 - DNA, 255 bp, Adeno-associated virus 10
ggtaattcctccggaaattggcattgcgattccacatggctgggcgacagagtcatcaccaccagcacccgaacctgggtcctgcccacctacaacaaccacatctacaagcaaatctccagcgagacaggagccaccaacgacaaccactacttcggctacagcaccccctgggggtattttgactttaacagattccactgccacttttcaccacgtgactggcagcgactcatcaacaacaactggggattc

SEQ ID NO: 30 - protein, 738 aa, Adeno-associated virus 10
MAADGYLPDWLEDNLSEGIREWWDLKPGAPKPKANQQKQDDGRGLVLPGYKYLGPFNGLDKGEPVNAADAAALEHDKAYDQQLKAGDNPYLRYNHADAEFQERLQEDTSFGGNLGRAVFQAKKRVLEPLGLVEEAAKTAPGKKRPVEPSPQRSPDSSTGIGKKGQQPAKKRLNFGQTGESESVPDPQPIGEPPAGPSGLGSGTMAAGGGAPMADNNEGADGVGSSSGNWHCDSTWLGDRVITTSTRTWALPTYNNHLYKQISNGTSGGSTNDNTYFGYSTPWGYFDFNRFHCHFSPRDWQRLINNNWGFRPKRLSFKLFNIQVKEVTQNEGTKTIANNLTSTIQVFTDSEYQLPYVLGSAHQGCLPPFPADVFMIPQYGYLTLNNGSQAVGRSSFYCLEYFPSQMLRTGNNFEFSYTFEDVPFHSSYAHSQSLDRLMNPLIDQYLYYLSRTQSTGGTQGTQQLLFSQAGPANMSAQAKNWLPGPCYRQQRVSTTLSQNNNSNFAWTGATKYHLNGRDSLVNPGVAMATHKDDEERFFPSSGVLMFGKQGAGRDNVDYSSVMLTSEEEIKTTNPVATEQYGVVADNLQQANTGPIVGNVNSQGALPGMVWQNRDVYLQGPIWAKIPHTDGNFHPSPLMGGFGLKHPPPQILIKNTPVPADPPTTFSQAKLASFITQYSTGQVSVEIEWELQKENSKRWNPEIQYTSNYYKSTNVDFAVNTEGTYSEPRPIGTRYLTRNL

SEQ ID NO: 31 - protein, 738 aa, Adeno-associated virus 10
MAADGYLPDWLEDNLSEGIREWWDLKPGAPKPKANQQKQDDGRGLVLPGYKYLGPFNGLDKGEPVNAADAAALEHDKAYDQQLKAGDNPYLRYNHADAEFQERLQEDTSFGGNLGRAVFQAKKRVLEPLGLVEEGAKTAPGKKRPVEPSPQRSPDSSTGIGKKGQQPAKKRLNFGQTGDSESVPDPQPIGEPPAGPSGLGSGTMAAGGGAPMADNNEGADGVGSSSGNWHCDSTWLGDRVITTSTRTWALPTYNNHLYKQISNGTSGGSTNDNTYFGYSTPWGYFDFNRFHCHFSPRDWQRLINNNWGFRPKRLNFKLFNIQVKEVTQNEGTKTIANNLTSTIQVFTDSEYQLPYVLGSAHQGCLPPFPADVFMIPQYGYLTLNNGSQAVGRSSFYCLEYFPSQMLRTGNNFEFSYQFEDVPFHSSYAHSQSLDRLMNPLIDQYLYYLSRTQSTGGTAGTQQLLFSQAGPNNMSAQAKNWLPGPCYRQQRVSTTLSQNNNSNFAWTGATKYHLNGRDSLVNPGVAMATHKDDEERFFPSSGVLMFGKQGAGKDNVDYSSVMLTSEEEIKTTNPVATEQYGVVADNLQQQNAAPIVGAVNSQGALPGMVWQNRDVYLQGPIWAKIPHTDGNFHPSPLMGGFGLKHPPPQILIKNTPVPADPPTTFSQAKLASFITQYSTGQVSVEIEWELQKENSKRWNPEIQYTSNYYKSTNVDFAVNTDGTYSEPRPIGTRYLTRNL

SEQ ID NO: 32 - DNA, 258 bp, Adeno-associated virus 11
ggtaattcctccggaaattggcattgcgattccacatggctgggcgacagagtcatcaccaccagcacccgaacctgggccctgccaacctacaacaaccacctctacaaacaaatctccagcgcttcaacgggggccagcaacgacaaccactactttggctacagcaccccctgggggtattttgactttaacagattccactgccacttctcaccacgtgactggcagcgactcatcaacaacaactggggattc

SEQ ID NO: 33 - DNA, 255 bp, Adeno-associated virus 12
ggtaattcctccggaaattggcattgcgattccacatggctgggcgaccgagtcattaccaccagcacccggacttgggccctgcccacctacaacaaccacctctacaagcaaatctccagccaatcgggtgccaccaacgacaaccactacttcggctacagcaccccttgggggtattttgatttcaacagattccactgccatttctcaccacgtgactggcagcgactcatcaacaacaactggggattc

SEQ ID NO: 34 - DNA, 2208 bp, Adeno-associated virus 2
atggctgccgatggttatcttccagattggctcgaggacactctctctgaaggaataagacagtggtggaagctcaaacctggcccaccaccaccaaagcccgcagagcggcataaggacgacagcaggggtcttgtgcttcctgggtacaagtacctcggacccttcaacggactcgacaagggagagccggtcaacgaggcagacgccgcggccctcgagcacgacaaagcctacgaccggcagctcgacagcggagacaacccgtacctcaagtacaaccacgccgacgcggagtttcaggagcgccttaaagaagatacgtcttttgggggcaacctcggacgagcagtcttccaggcgaaaaagagggttcttgaacctctgggcctggttgaggaacctgttaagacggctccgggaaaaaagaggccggtagagcactctcctgtggagccagactcctcctcgggaaccggaaaggcgggccagcagcctgcaagaaaaagattgaattttggtcagactggagacgcagactcagtacctgacccccagcctctcggacagccaccagcagccccctctggtctgggaactaatacgatggctacaggcagtggcgcaccaatggcagacaataacgagggcgccgacggagtgggtaattcctcgggaaattggcattgcgattccacatggatgggcgacagagtcatcaccaccagcacccgaacctgggccctgcccacctacaacaaccacctctacaaacaaatttccagccaatcaggagcctcgaacgacaatcactactttggctacagcaccccttgggggtattttgacttcaacagattccactgccacttttcaccacgtgactggcaaagactcatcaacaacaactggggattccgacccaagagactcaacttcaagctctttaacattcaagtcaaagaggtcacgcagaatgacggtacgacgacgattgccaataaccttaccagcacggttcaggtgtttactgactcggagtaccagctcccgtacgtcctcggctcggcgcatcaaggatgcctcccgccgttcccagcagacgtcttcatggtgccacagtatggatacctcaccctgaacaacgggagtcaggcagtaggacgctcttcattttactgcctggagtactttccttctcagatgctgcgtaccggaaacaactttaccttcagctacacttttgaggacgttcctttccacagcagctacgctcacagccagagtctggaccgtctcatgaatcctctcatcgaccagtacctgtattacttgagcagaacaaacactccaagtggaaccaccacgcagtcaaggcttcagttttctcaggccggagcgagtgacattcgggaccagtctaggaactggcttcctggaccctgttaccgccagcagcgagtatcaaagacatctgcggataacaacaacagtgaatactcgtggactggagctaccaagtaccacctcaatggcagagactctctggtgaatccgggcccggccatggcaagccacaaggacgatgaagaaaagttttttcctcagagcggggttctcatctttgggaagcaaggctcagagaaaacaaatgtggacattgaaaaggtcatgattacagacgaagaggaaatcaggacaaccaatcccgtggctacggagcagtatggttctgtatctaccaacctccagagaggcaacagacaagcagctaccgcagatgtcaacacacaaggcgttcttccaggcatggtctggcaggacagagatgtgtaccttcaggggcccatctgggcaaagattccacacacggacggacattttcacccctctcccctcatgggtggattcggacttaaacaccctcctccacagattctcatcaagaacaccccggtacctgcgaatccttcgaccaccttcagtgcggcaaagtttgcttccttcatcacacagtactccacgggacaggtcagcgtggagatcgagtgggagctgcagaaggaaaacagcaaacgctggaatcccgaaattcagtacacttccaactacaacaagtctgttaatgtggactttactgtggacactaatggcgtgtattcagagcctcgccccattggcaccagatacctgactcgtaatctgtaa

SEQ ID NO: 35 - protein, 735 aa, Adeno-associated virus 2 [sequence omitted]

SEQ ID NO: 36 - protein, 621 aa, Adeno-associated virus 2
MPGFYEIVIKVPSDLDGHLPGISDSFVNWVAEKEWELPPDSDMDLNLIEQAPLTVAEKLQRDFLTEWRRVSKAPEALFFVQFEKGESYFHMHVLVETTGVKSMVLGRFLSQIREKLIQRIYRGIEPTLPNWFAVTKTRNGAGGGNKVVDECYIPNYLLPKTQPELQWAWTNMEQYLSACLNLTERKRLVAQHLTHVSQTQEQNKENQNPNSDAPVIRSKTSARYMELVGWLVDKGITSEKQWIQEDQASYISFNAASNSRSQIKAALDNAGKIMSLTKTAPDYLVGQQPVEDISSNRIYKILELNGYDPQYAASVFLGWATKKFGKRNTIWLFGPATTGKTNIAEAIAHTVPFYGCVNWTNENFPFNDCVDKMVIWWEEGKMTAKVVESAKAILGGSKVRVDQKCKSSAQIDPTPVIVTSNTNMCAVIDGNSTTFEHQQPLQDRMFKFELTRRLDHDFGKVTKQEVKDFFRWAKDHVVEVEHEFYVKKGGAKKRPAPSDADISEPKRVRESVAQPSTSDAEASINYADRYQNKCSRHVGMNLMLFPCRQCERMNQNSNICFTHGQKDCLECFPVSESQPVSVVKKAYQKLCYIHHIMGKVPDACTACDLVNVDLDDCIFEQ

SEQ ID NO: 37 - DNA, 4675 bp, Adeno-associated virus 2
ttggccactccctctctgcgcgctcgctcgctcactgaggccgggcgaccaaaggtcgcccgacgcccgggctttgcccgggcggcctcagtgagcgagcgagcgcgcagagagggagtggccaactccatcactaggggttcctggaggggtggagtcgtgacgtgaattacgtcatagggttagggaggtcctgtattagaggtcacgtgagtgttttgcgacattttgcgacaccatgtggtcacgctgggtatttaagcccgagtgagcacgcagggtctccattttgaagcgggaggtttgaacgcgcagccgccatgccggggttttacgagattgtgattaaggtccccagcgaccttgacgggcatctgcccggcatttctgacagctttgtgaactgggtggccgagaaggaatgggagttgccgccagattctgacatggatctgaatctgattgagcaggcacccctgaccgtggccgagaagctgcagcgcgactttctgacggaatggcgccgtgtgagtaaggccccggaggcccttttctttgtgcaatttgagaagggagagagctacttccacatgcacgtgctcgtggaaaccaccggggtgaaatccatggttttgggacgtttcctgagtcagattcgcgaaaaactgattcagagaatttaccgcgggatcgagccgactttgccaaactggttcgcggtcacaaagaccagaaatggcgccggaggcgggaacaaggtggtggatgagtgctacatccccaattacttgctccccaaaacccagcctgagctccagtgggcgtggactaatatggaacagtatttaagcgcctgtttgaatctcacggagcgtaaacggttggtggcgcagcatctgacgcacgtgtcgcagacgcaggagcagaacaaagagaatcagaatcccaattctgatgcgccggtgatcagatcaaaaacttcagccaggtacatggagctggtcgggtggctcgtggacaaggggattacctcggagaagcagtggatccaggaggaccaggcctcatacatctccttcaatgcggcctccaactcgcggtcccaaatcaaggctgccttggacaatgcgggaaagattatgagcctgactaaaaccgcccccgactacctggtgggccagcagcccgtggaggacatttccagcaatcggatttataaaattttggaactaaacgggtacgatccccaatatgcggcttccgtctttctgggatgggccacgaaaaagttcggcaagaggaacaccatctggctgtttgggcctgcaactaccgggaagaccaacatcgcggaggccatagcccacactgtgcccttctacgggtgcgtaaactggaccaatgagaactttcccttcaacgactgtgtcgacaagatggtgatctggtgggaggaggggaagatgaccgccaaggtcgtggagtcggccaaagccattctcggaggaagcaaggtgcgcgtggaccagaaatgcaagtcctcggcccagatagacccgactcccgtgatcgtcacctccaacaccaacatgtgcgccgtgattgacgggaactcaacgaccttcgaacaccagcagccgttgcaagaccggatgttcaaatttgaactcacccgccgtctggatcatgactttgggaaggtcaccaagcaggaagtcaaagactttttccggtgggcaaaggatcacgtggttgaggtggagcatgaattctacgtcaaaaagggtggagccaagaaaagacccgcccccagtgacgcagatataagtgagcccaaacgggtgcgcgagtcagttgcgcagccatcgacgtcagacgcggaagcttcgatcaactacgcagacaggtaccaaaacaaatgttctcgtcacgtgggcatgaatctgatgctgtttccctgcagacaatgcgagagaatgaatcagaattcaaatatctgcttcactcacggacagaaagactgtttagagtgctttcccgtgtcagaatctcaacccgtttctgtcgtcaaaaaggcgtatcagaaactgtgctacattcatcatatcatgggaaaggtgccagacgcttgcactgcctgcgatctggtcaatgtggatttggatgactgcatctttgaacaataaatgatttaaatcaggtatggctgccgatggttatcttccagattggctcgaggacactctctctgaaggaataagacagtggtggaagctcaaacctggcccaccaccaccaaagcccgcagagcggcataaggacgacagcaggggtcttgtgcttcctgggtacaagtacctcggacccttcaacggactcgacaagggagagccggtcaacgaggcagacgccgcggccctcgagcacgtacaaagcctacgaccggcagctcgacagcggagacaacccgtacctcaagtacaaccacgccgacgcggagtttcaggagcgccttaaagaagatacgtcttttgggggcaacctcggacgagcagtcttccaggcgaaaaagagggttcttgaacctctgggcctggttgaggaacctgttaagacggctccgggaaaaaagaggccggtagagcactctcctgtggagccagactcctcctcgggaaccggaaaggcgggccagcagcctgcaagaaaaagattgaattttggtcagactggagacgcagactcagtacctgacccccagcctctcggacagccaccagcagccccctctggtctgggaactaatacgatggctacaggcagtggcgcaccaatggcagacaataacgagggcgccgacggagtgggtaattcctccggaaattggcattgcgattccacatggatgggcgacagagtcatcaccaccagcacccgaacctgggccctgcccacctacaacaaccacctctacaaacaaatttccagccaatcaggagcctcgaacgacaatcactactttggctacagcaccccttgggggtattttgacttcaacagattccactgccacttttcaccacgtgactggcaaagactcatcaacaacaactggggattccgacccaagagactcaacttcaagctctttaacattcaagtcaaagaggtcacgcagaatgacggtacgacgacgattgccaataaccttaccagcacggttcaggtgtttactgactcggagtaccagctcccgtacgtcctcggctcggcgcatcaaggatgcctcccgccgttcccagcagacgtcttcatggtgccacagtatggatacctcaccctgaacaacgggagtcaggcagtaggacgctcttcattttactgcctggagtactttccttctcagatgctgcgtaccggaaacaactttaccttcagctacacttttgaggacgttcctttccacagcagctacgctcacagccagagtctggaccgtctcatgaatcctctcatcgaccagtacctgtattacttgagcagaacaaacactccaagtggaaccaccacgcagtcaaggcttcagttttctcaggccggagcgagtgacattcgggaccagtctaggaactggcttcctggaccctgttaccgccagcagcgagtatcaaagacatctgcggataacaacaacagtgaatactcgtggactggagctaccaagtaccacctcaatggcagagactctctggtgaatccggccatggcaagccacaaggacgatgaagaaaagttttttcctcagagcggggttctcatctttgggaagcaaggctcagagaaaacaaatgtgaacattgaaaaggtcatgattacagacgaagaggaaatcggaacaaccaatcccgtggctacggagcagtatggttctgtatctaccaacctccagagaggcaacagacaagcagctaccgcagatgtcaacacacaaggcgttcttccaggcatggtctggcaggacagagatgtgtaccttcaggggcccatctgggcaaagattccacacacggacggacattttcacccctctcccctcatgggtggattcggacttaaacaccctcctccacagattctcatcaagaacaccccggtacctgcgaatccttcgaccaccttcagtgcggcaaagtttgcttccttcatcacacagtactccacgggacacggtcagcgtggagatcgagtgggagctgcagaaggaaaacagcaaacgctggaatcccgaaattcagtacacttccaactacaacaagtctgttaatcgtggacttaccgtggatactaatggcgtgtattcagagcctcgccccattggcaccagatacctgactcgtaatctgtaattgcttgttaatcaataaaccgtttaattcgtttcagttgaactttggtctctgcgtatttctttcttatctagtttccatggctacgtagataagtagcatggcgggttaatcattaactacaaggaacccctagtgatggagttggccactccctctctgcgcgctcgctcgctcactgaggccgggcgaccaaaggtcgcccgacgcccgggctttgcccgggcggcctcagtgagcgagcgagcgcgcagagagggagtggccaa

SEQ ID NO: 38 - DNA, 4679 bp, Adeno-associated virus 2
ttggccactccctctctgcgcgctcgctcgctcactgaggccgggcgaccaaaggtcgcccgacgcccgggctttgcccgggcggcctcagtgagcgagcgagcgcgcagagagggagtggccaactccatcactaggggttcctggaggggtggagtcgtgacgtgaattacgtcatagggttagggaggtcctgtattagaggtcacgtgagtgttttgcgacattttgcgacaccatgtggtcacgctgggtatttaagcccgagtgagcacgcagggtctccattttgaagcgggaggtttgaacgcgcagccgccatgccggggttttacgagattgtgattaaggtccccagcgaccttgacgggcatctgcccggcatttctgacagctttgtgaactgggtggccgagaaggaatgggagttgccgccagattctgacatggatctgaatctgattgagcaggcacccctgaccgtggccgagaagctgcagcgcgactttctgacggaatggcgccgtgtgagtaaggccccggaggcccttttctttgtgcaatttgagaagggagagagctacttccacatgcacgtgctcgtggaaaccaccggggtgaaatccatggttttgggacgtttcctgagtcagattcgcgaaaaactgattcagagaatttaccgcgggatcgagccgactttgccaaactggttcgcggtcacaaagaccagaaatggcgccggaggcgggaacaaggtggtggatgagtgctacatccccaattacttgctccccaaaacccagcctgagctccagtgggcgtggactaatatggaacagtatttaagcgcctgtttgaatctcacggagcgtaaacggttggtggcgcagcatctgacgcacgtgtcgcagacgcaggagcagaacaaagagaatcagaatcccaattctgatgcgccggtgatcagatcaaaaacttcagccaggtacatggagctggtcgggtggctcgtggacaaggggattacctcggagaagcagtggatccaggaggaccaggcctcatacatctccttcaatgcggcctccaactcgcggtcccaaatcaaggctgccttggacaatgcgggaaagattatgagcctgactaaaaccgcccccgactacctggtgggccagcagcccgtggaggacatttccagcaatcggatttataaaattttggaactaaacgggtacgatccccaatatgcggcttccgtctttctgggatgggccacgaaaaagttcggcaagaggaacaccatctggctgtttgggcctgcaactaccgggaagaccaacatcgcggaggccatagcccacactgtgcccttctacgggtgcgtaaactggaccaatgagaactttcccttcaacgactgtgtcgacaagatggtgatctggtgggaggaggggaagatgaccgccaaggtcgtggagtcggccaaagccattctcggaggaagcaaggtgcgcgtggaccagaaatgcaagtcctcggcccagatagacccgactcccgtgatcgtcacctccaacaccaacatgtgcgccgtgattgacgggaactcaacgaccttcgaacaccagcagccgttgcaagaccggatgttcaaatttgaactcacccgccgtctggatcatgactttgggaaggtcaccaagcaggaagtcaaagactttttccggtgggcaaaggatcacgtggttgaggtggagcatgaattctacgtcaaaaagggtggagccaagaaaagacccgcccccagtgacgcagatataagtgagcccaaacgggtgcgcgagtcagttgcgcagccatcgacgtcagacgcggaagcttcgatcaactacgcagacaggtaccaaaacaaatgttctcgtcacgtgggcatgaatctgatgctgtttccctgcagacaatgcgagagaatgaatcagaattcaaatatctgcttcactcacggacagaaagactgtttagagtgctttcccgtgtcagaatctcaacccgtttctgtcgtcaaaaaggcgtatcagaaactgtgctacattcatcatatcatgggaaaggtgccagacgcttgcactgcctgcgatctggtcaatgtggatttggatgactgcatctttgaacaataaatgatttaaatcaggtatggctgccgatggttatcttccagattggctcgaggacactctctctgaaggaataagacagtggtggaagctcaaacctggcccaccaccaccaaagcccgcagagcggcataaggacgacagcaggggtcttgtgcttcctgggtacaagtacctcggacccttcaacggactcgacaagggagagccggtcaacgaggcagacgccgcggccctcgagcacgacaaagcctacgaccggcagctcgacagcggagacaacccgtacctcaagtacaaccacgccgacgcggagtttcaggagcgccttaaagaagatacgtcttttgggggcaacctcggacgagcagtcttccaggcgaaaaagagggttcttgaacctctgggcctggttgaggaacctgttaagacggctccgggaaaaaagaggccggtagagcactctcctgtggagccagactcctcctcgggaaccggaaaggcgggccagcagcctgcaagaaaaagattgaattttggtcagactggagacgcagactcagtacctgacccccagcctctcggacagccaccagcagccccctctggtctgggaactaatacgatggctacaggcagtggcgcaccaatggcagacaataacgagggcgccgacggagtgggtaattcctccggaaattggcattgcgattccacatggatgggcgacagagtcatcaccaccagcacccgaacctgggccctgcccacctacaacaaccacctctacaaacaaatttccagccaatcaggagcctcgaacgacaatcactactttggctacagcaccccttgggggtattttgacttcaacagattccactgccacttttcaccacgtgactggcaaagactcatcaacaacaactggggattccgacccaagagactcaacttcaagctctttaacattcaagtcaaagaggtcacgcagaatgacggtacgacgacgattgccaataaccttaccagcacggttcaggtgtttactgactcggagtaccagctcccgtacgtcctcggctcggcgcatcaaggatgcctcccgccgttcccagcagacgtcttcatggtgccacagtatggatacctcaccctgaacaacgggagtcaggcagtaggacgctcttcattttactgcctggagtactttccttctcagatgctgcgtaccggaaacaactttaccttcagctacacttttgaggacgttcctttccacagcagctacgctcacagccagagtctggaccgtctcatgaatcctctcatcgaccagtacctgtattacttgagcagaacaaacactccaagtggaaccaccacgcagtcaaggcttcagttttctcaggccggagcgagtgacattcgggaccagtctaggaactggcttcctggaccctgttaccgccagcagcgagtatcaaagacatctgcggataacaacaacagtgaatactcgtggactggagctaccaagtaccacctcaatggcagagactctctggtgaatccgggcccggccatggcaagccacaaggacgatgaagaaaagttttttcctcagagcggggttctcatctttgggaagcaaggctcagagaaaacaaatgtggacattgaaaaggtcatgattacagacgaagaggaaatcaggacaaccaatcccgtggctacggagcagtatggttctgtatctaccaacctccagagaggcaacagacaagcagctaccgcagatgtcaacacacaaggcgttcttccaggcatggtctggcaggacagagatgtgtaccttcaggggcccatctgggcaaagattccacacacggacggacattttcacccctctcccctcatgggtggattcggacttaaacaccctcctccacagattctcatcaagaacaccccggtacctgcgaatccttcgaccaccttcagtgcggcaaagtttgcttccttcatcacacagtactccacgggacaggtcagcgtggagatcgagtgggagctgcagaaggaaaacagcaaacgctggaatcccgaaattcagtacacttccaactacaacaagtctgttaatgtggactttactgtggacactaatggcgtgtattcagagcctcgccccattggcaccagatacctgactcgtaatctgtaattgcttgttaatcaataaaccgtttaattcgtttcagttgaactttggtctctgcgtatttctttcttatctagtttccatggctacgtagataagtagcatggcgggttaatcattaactacaaggaacccctagtgatggagttggccactccctctctgcgcgctcgctcgctcactgaggccgggcgaccaaaggtcgcccgacgcccgggctttgcccgggcggcctcagtgagcgagcgagcgcgcagagagggagtggccaa

SEQ ID NO: 39 - protein, 725 aa, Adeno-associated virus 5
MAADGYLPDWLEDTLSEGIRQWWKLKPGPPPPKPAERHKDDSRGLVLPGYKYLGPFNGLDKGEPVNEADAAALEHDKAYDRQLDSGDNPYLKYNHADAEFQERLKEDTSFGGNLGRAVFQAKKRVLEPFGLVEEGAKTAPTGKRIDDHFPKRKKARTEEDSKPSTSSDAEAGPSGSQQLQIPAQPASSLGADTMSAGGGGPLGDNNQGADGVGNASGDWHCDSTWMGDRVVTKSTRTWVLPSYNNHQYREIKSGSVDGSNANAYFGYSTPWGYFDFNRFHSHWSPRDWQRLINNYWGFRPRSLRVKIFNIQVKEVTVQDSTTTIANNLTSTVQVFTDDDYQLPYVVGNGTEGCLPAFPPQVFTLPQYGYATLNRDNTENPTERSSFFCLEYFPSKMLRTGNNFEFTYNFEEVPFHSSFAPSQNLFKLANPLVDQYLYRFVSTNNTGGVQFNKNLAGRYANTYKNWFPGPMGRTQGWNLGSGVNRASVSAFATTNRMELEGASYQVPPQPNGMTNNLQGSNTYALENTMIFNSQPANPGTTATYLEGNMLITSESETQPVNRVAYNVGGQMATNNQSSTTAPTTGTYNLQEIVPGSVWMERDVYLQGPIWAKIPETGAHFHPSPAMGGFGLKHPPPMMLIKNTPVPGNITSFSDVPVSSFITQYSTGQVTVEMEWELKKENSKRWNPEIQYTNNYNDPQFVDFAPDSTGEYRTTRPIGTRYLTRPL

SEQ ID NO: 40 - protein, 644 aa, Adeno-associated virus
  MOD_RES (434)..(434): Xaa = Any amino acid
KAYDQQLKAGDNPYLRYNHADAEFQERLQEDTSFGGNLGRAVFQAKKRVLEPLGLVETPAKTAPGKKRPVDSPDSTSGIGKKGQQPAKKRLNFGQTGDSESVPDPQPIGEPPAGPSGLGSGTMAAGGGAPMADNNEGADGVGNASGNWHCDSTWLGDRVITTSTRTWALPTYNNHLYKQISSQSAGSTNDNVYFGYSTPWGYFDFNRFHCHFSPRDWQRLINNNWGFRPKKLNFKLFNIQVKEVTTNDGVTTIANNLTSTVQVFSDSEYQLPYVLGSAHQGCLPPFPADVFMIPQYGYLTLNNGSQSVGRSSFYCLEYFPSQMLRTGNNFTFSYTFEDVPFHSSYAHSQSLDRLMNPLIDQYLYYLARTQSNAGGTAGNRELQFYQGGPTTMAEQAKNWLPGPCFRQQRVSKTLDQNNNSNFAWTGATKYHLNXRNSLVNPGVAMATHKDDEERFFPSSGVLIFGKTGAANKTTLENVLMTNEEEIRPTNPVATEEYGIVSSNLQAASTAAQTQVVNNQGALPGMVWQNRDVYLQGPIWAKIPHTDGNFHPSPLMGGFGLKHPPPQILIKNTPVPANPPEVFTPAKFASFITQYSTGQVSVEIEWELQKENSKRWNPEIQYTSNFDKQTGVDFAVDSQGVYSEP

SEQ ID NO: 41 - DNA, 1933 bp, Adeno-associated virus
caaggcctacgaccagcagctcaaagcgggtgacaatccgtacctgcggtataaccacgccgacgccgagtttcaggagtgtcttcaagaagatacgtcttttgggggcaacctcgggcgagcagtcttccaggccaaaaagcgggttctcgaacctcttggtctggttgagacgccagctaagacggcacctggaaagaagcgaccggtagactcgccagactccacctcgggcatcggcaagaaaggccagcagcccgcgaaaaagagactcaactttgggcagactggcgactcagagtcagtccccgaccctcaaccaatcggagaaccaccagcaggcccctctggtctgggatctggtacaatggttgcaggcggtggcgcaccaatggctgacaataacgagggcgccgacggagtgggtaatgcctcaggaaattggcattgcgattccacatggctgggcgacagagtcatcaccaccagcacccgaacctgggccctgcccacctacaacaaccacctctacaagcaaatctccagtcagtcagcagggagcaccaacgataacgtctatttcggctacagcaccccctgggggtattttgacttcaacagattccattgccacttctcaccacgtgactggcagcgacttatcaacaacaactggggattccggcccaagaagctcaacttcaagctcttcaacatccaggtcaaggaggtcacgacgaatgacggtgtcacaaccatcgctaataaccttaccagcacggttcaggtcttttcggactcggaatatcaactgccgtacgtcctcggctccgcgcaccagggctgcctgcctccgttcccggcagacgtgttcatgattccgcagtacggatacctgactctgaacaatggcagccaatcggtaggccgttcctccttctactgcctggagtactttccttctcagatgctgagaacgggcaacaacttcacctttagctacaccttcgaggacgtgcctttccacagcagctacgcgcacagccagagtctggaccggctgatgaatcccctcatcgaccagtacctgtactacttggccagaacacagagcaacgcaggaggtactgctggcaatcgggaactgcagttttatcagggcggacctaccaccatggccgaacaagcaaagaactggctgcccggaccttgcttccggcaacagagagtatccaagacgctggatcaaaataacaacagcaactttgcctggactggtgccacaaaataccatttaaatggaagaaattcattggttaatcccggtgtcgccatggcaacccacaaggacgacgaggaacgcttctccccttcgagcggagttctaatttttggcaaaactggagcagctaataaaactacattagaaaacgtgctcatgacaaatgaagaagaaattcgtcctaccaacccggtagctaccgaggaatacgggattgtaagcagcaacttgcaggcggctagcaccgcagcccagacacaagttgttaacaaccagggagccttacctggcatggtctggcagaaccgggacgtgtacctgcaaggtcccatttgggccaagattcctcacacggacggcaactttcacccgtctcctctaatgggtggctttggactgaaacacccgcctccccagatcctgatcaaaaacacgccggtacctgctaatcctccagaagtgtttactcctgccaagtttgcttccttcatcacgcagtacagcaccgggcaagtcagcgttgagatcgagtgggagctgcagaaagagaacagcaagcgctggaacccagagattcagtacacctccaactttgacaaacagactggagtggactttgctgttgacagccagggtgtttactctgagcct

SEQ ID NO: 42 - protein, 644 aa, Adeno-associated virus
KAYDQQLKAGDNPYLRYNHADAEFQECLQEDTSFGGNLGRAVFQAKKRVLEPLGLVETPAKTAPGKKRPVDSPDSTSGIGKKGQQPAKKRLNFGQTGDSESVPDPQPIGEPPAGPSGLGSGTMVAGGGAPMADNNEGADGVGNASGNWHCDSTWLGDRVITTSTRTWALPTYNNHLYKQISSQSAGSTNDNVYFGYSTPWGYFDFNRFHCHFSPRDWQRLINNNWGFRPKKLNFKLFNIQVKEVTTNDGVTTIANNLTSTVQVFSDSEYQLPYVLGSAHQGCLPPFPADVFMIPQYGYLTLNNGSQSVGRSSFYCLEYFPSQMLRTGNNFTFSYTFEDVPFHSSYAHSQSLDRLMNPLIDQYLYYLARTQSNAGGTAGNRELQFYQGGPTTMAEQAKNWLPGPCFRQQRVSKTLDQNNNSNFAWTGATKYHLNGRNSLVNPGVAMATHKDDEERFSPSSGVLIFGKTGAANKTTLENVLMTNEEEIRPTNPVATEEYGIVSSNLQAASTAAQTQVVNNQGALPGMVWQNRDVYLQGPIWAKIPHTDGNFHPSPLMGGFGLKHPPPQILIKNTPVPANPPEVFTPAKFASFITQYSTGQVSVEIEWELQKENSKRWNPEIQYTSNFDKQTGVDFAVDSQGVYSEP

SEQ ID NO: 43 - DNA, 1933 bp, Adeno-associated virus
caaggcctacgaccagcagctcaaagcgggtgacaatccgtacctgcggtataaccacgccgacgccgagtttcaggagcgtcttcaagaagatacgtcttttgggggcaacctcgggcgagcagtcttccaggccaaaaagcgggttctcgaacctcttggtctggttgagacgccagctaagacggcacctggaaagaagcgaccggtagactcgccagactccacctcgggcatcggcaagaaaggccagcagcccgcgaaaaagagactcaactttgggcagactggcgactcagagccagtccccgaccctcaaccaatcggagaaccaccagcaggcccctctggtctgggatctggtacaatggctgcaggcggtggcgcaccaatggctgacaataacgagggcgccgacggagtgggtaatgcctcaggaaattggcattgcgattccacacggctgggcgacagagtcatcaccaccagcacccgaacctgggccctgcccacctacaacaaccacctctacaagcaaatctccagtcagtcagcagggagcaccaacgataacgtctatttcggctacagcaccccctgggggtattttgacttcaacagattccattgccacttctcaccacgtgactggcagcgacttatcaacaacaactggggattccggcccaagaagctcaacttcaagctcttcaacatccaggtcaaggaggtcacgacgaatgacggcgtcacaaccatcgctaataaccttaccagcacggttcaggtcttttcggactcggaatatcaactgccgtacgtcctcggctccgcgcaccagggctgcctgcctccgttcccggcagacgtgttcatgattccgcagtacggatacctgactctgaacaatggcagccaatcggtaggccgttcctccttctactgcctggagtactttccttctcagatgctgagaacgggcaacaacttcacctttagctacaccttcgaggacgtgcctttccacagcagctacgcgcacagccagagtctgggccggctgatgaatcccctcatcgaccagtacctgtactacttggccagaacacagagcaacgcaggaggtactgctggcaatcgggaactgcagttttatcagggcggacctaccaccatggccgaacaagcaaagaactggctgcccggaccttgcttccggcaacagagagtatccaagacgctggatcaaaataacaacagcaactttgcctggactggtgccacaaaataccatttaaatggaagaaattcattggttaatcccggtgtcgccatggcaacccacaaggacgacgaggaacgcttcttcccttcgagcggagttctaatttttggcaaaactggagcagctaataaaactacattagaaaacgtgctcatgacaaatgaagaagaaattcgtcctaccaacccggtagctaccgaggaatacgggattgtaagcagcaacttgcaggcggctagcaccgcagcccagacacaagttgttaacaaccagggagccttacctggcatggtctggcagaaccgggacgtgtacctgcaaggtcccatttgggccaagattcctcacacggacggcaactttcacccgtctcctctaatgggtggctttggactgaaacacccgcctccccagatcctgatcaaaaacacaccggtacctgctaatcctccagaagtgtttactcctgccaagtttgcttccttcatcacgcagtacagcaccgggcaagtcagcgttgagatcgaatgggagctgcagaaagagaacagcaagcgctggaacccagagattcagtacacctccaactttgacaaacagactggagtggactttgctgttgacagccagggtgtttactctgagcct

SEQ ID NO: 44 - protein, 644 aa, Adeno-associated virus
KAYDQQLKAGDNPYLRYNHADAEFQERLQEDTSFGGNLGRAVFQAKKRVLEPLGLVETPAKTAPGKKRPVDSPDSTSGIGKKGQQPAKKRLNFGQTGDSEPVPDPQPIGEPPAGPSGLGSGTMAAGGGAPMADNNEGADGVGNASGNWHCDSTRLGDRVITTSTRTWALPTYNNHLYKQISSQSAGSTNDNVYFGYSTPWGYFDFNRFHCHFSPRDWQRLINNNWGFRPKKLNFKLFNIQVKEVTTNDGVTTIANNLTSTVQVFSDSEYQLPYVLGSAHQGCLPPFPADVFMIPQYGYLTLNNGSQSVGRSSFYCLEYFPSQMLRTGNNFTFSYTFEDVPFHSSYAHSQSLGRLMNPLIDQYLYYLARTQSNAGGTAGNRELQFYQGGPTTMAEQAKNWLPGPCFRQQRVSKTLDQNNNSNFAWTGATKYHLNGRNSLVNPGVAMATHKDDEERFFPSSGVLIFGKTGAANKTTLENVLMTNEEEIRPTNPVATEEYGIVSSNLQAASTAAQTQVVNNQGALPGMVWQNRDVYLQGPIWAKIPHTDGNFHPSPLMGGFGLKHPPPQILIKNTPVPANPPEVFTPAKFASFITQYSTGQVSVEIEWELQKENSKRWNPEIQYTSNFDKQTGVDFAVDSQGVYSEP

SEQ ID NO: 45 - DNA, 1933 bp, Adeno-associated virus; identical to SEQ ID NO: 43

SEQ ID NO: 46 - protein, 644 aa, Adeno-associated virus; identical to SEQ ID NO: 44

SEQ ID NO: 47 - DNA, 1933 bp, Adeno-associated virus
caaggcctacgaccagcagctcaaagcgggtgacaatccgtacctgcggtataaccacgccgacgccgagtttcaggagcgtcttcaagaagatacgtcttttgggggcaacctcgggcgagcagtcttccaggccaaaaagcgggttctcgaacctcttggtctggttgagacgccagctaagacggcacctggaaagaagcgaccggtagactcgccagactccacctcgggcatcggcaagaaaggccagcagcccgcgaaaaagagactcaactttgggcagactggcgactcagagtcagtccccgaccctcaaccaatcggagaaccaccagcaggcccctctggtctgggatctggtacaatggctgcaggcggtggcgcaccaatggctgacaatagcgagggcgccgacggagtgggtaatgcctcaggaaattggcattgcgattccacatggctgggcgacagagtcatcaccaccagcacccgaacctgggccctgcccacctacaacaaccacctctacaagcaaatctccagtcagtcagcagggagcaccaacgataacgtctatttcggctacagcaccccctgggggtattttgacttcaacagattccattgccacttctcaccacgtgactggcagcgacttatcaacaacaactggggattccggcccaagaagctcaacttcaagctcttcaacatccaggtcaaggaggtcacgacgaatgacggtgtcacaaccatcgctaataaccttaccagcacggttcaggtcttttcggactcggaatatcaactgccgtacgtcctcggctccgcgcaccagggctgcctgcctccgttcccggcagacgtgttcatgattccgcagtacggatacctgactctgaacaatggcagccaatcggtaggccgttcctccttctactgcctggagtactttccttctcagatgctgagaacgggcaacaacttcacctttagctacaccttcgaggacgtgcctttccacagcagctacgcgcacagccagagtctggaccggctgatgaatcccctcatcgaccagtacctgtactacttggccagaacacagagcaacgcaggaggtactgctggcaatcgggaactgcagttttatcagggcggacctaccaccatggccgaacaagcaaagaactggctgcccggaccttgcttccggcaacagagagtatccaagacgctggatcaaaataacaacagcaactttgcctggactggtgccacaaaataccatttaaatggaagaaattcattggttaatcccggtgtcgccatggcaacccacaaggacgacgaggaacgcttcttcccttcgagcggagttctaatttttggcaaaactggagcagctaataaaactacattagaaaacgtgctcatgacaaatgaagaagaaattcgtcctaccaacccggtagctaccgaggaatacgggattgtaagcagcaacttgcaggcggctagcaccgcagcccagacacaagttgttaacaaccagggagccttacctggcatggtctggcagaaccgggacgtgtacctgcaaggtcccatttgggccaagattcctcacacggacggcaactttcacccgtctcctctaatgggtggctttggactgaaacacccgcctccccagatcctgatcaaaaacacaccggtacctgctaatcctccagaagtgtttactcctgccaagcttgcttccttcatcacgcagtacagcaccgggcaagtcagcgttgagatcgagtgggagctgcagaaagagaacagcaagcgctggaacccagagattcagtacacctccaactttgacaaacagactggagtggactttgctgttgacagccagggtgtttactctgagcct

SEQ ID NO: 48 - protein, 644 aa, Adeno-associated virus
KAYDQQLKAGDNPYLRYNHADAEFQERLQEDTSFGGNLGRAVFQAKKRVLEPLGLVETPAKTAPGKKRPVDSPDSTSGIGKKGQQPAKKRLNFGQTGDSESVPDPQPIGEPPAGPSGLGSGTMAAGGGAPMADNSEGADGVGNASGNWHCDSTWLGDRVITTSTRTWALPTYNNHLYKQISSQSAGSTNDNVYFGYSTPWGYFDFNRFHCHFSPRDWQRLINNNWGFRPKKLNFKLFNIQVKEVTTNDGVTTIANNLTSTVQVFSDSEYQLPYVLGSAHQGCLPPFPADVFMIPQYGYLTLNNGSQSVGRSSFYCLEYFPSQMLRTGNNFTFSYTFEDVPFHSSYAHSQSLDRLMNPLIDQYLYYLARTQSNAGGTAGNRELQFYQGGPTTMAEQAKNWLPGPCFRQQRVSKTLDQNNNSNFAWTGATKYHLNGRNSLVNPGVAMATHKDDEERFFPSSGVLIFGKTGAANKTTLENVLMTNEEEIRPTNPVATEEYGIVSSNLQAASTAAQTQVVNNQGALPGMVWQNRDVYLQGPIWAKIPHTDGNFHPSPLMGGFGLKHPPPQILIKNTPVPANPPEVFTPAKLASFITQYSTGQVSVEIEWELQKENSKRWNPEIQYTSNFDKQTGVDFAVDSQGVYSEP

SEQ ID NO: 49 - DNA, 1933 bp, Adeno-associated virus
caaggcctacgaccagcagctcaaagcgggtgacaatccgtacctgcggtataaccacgccgacgccgagtttcaggagcgtcttcaagaagatacgtcttttgggggcaacctcgggcgagcagtcttccaggccaaaaagcgggttctcgaacctcttggtctggttgagacgccagctaagacggcacctggaaagaagcgaccggtagactcgccagactccacctcgggcatcggcaagaaaggccagcagcccgcgaaaaagagactcaactttgggcagactggcgactcagagtcagtccccgaccctcaaccaatcggagaaccaccagcaggcccctctggtctgggatctggtacaatggctgcaggcggtggcgcaccaatggctgacaataacgagggcgccgacggagtgggtaatgcctcaggaaattggcattgcgattccacatggctgggcgacagagtcatcaccaccagcacccgaacctgggccctgcccacctacaacaaccacctctacaagcaaatctccagtcagtcagcagggagcaccaacgataacgtctatttcggctacagcaccccctgggggtattttgacttcaacagattccattgccacttctcaccacgtgactggcagcgacttatcaacaacaactggggattccggcccaagaagctcaacttcaagctcttcaacatccaggtcaaggaggtcacgacgaatgacggcgtcacaaccatcgctaataaccttaccagcacggttcaggtcttttcggacccggaatatcaactgccgtacgtcctcggctccgcgcaccagggctgcctgcctccgttcccggcagacgtgttcatgattccgcagtacggatacctgactctgaacaatggcagccaatcggtaggccgttcctccttctactgcctggagtactttccttctcagatgctgagaacgggcaacaacttcacctttagctacaccttcgaggacgtgcctttccacagcagctacgcgcacagccagagtctggaccggctgatgaatcccctcatcgaccagtacctgtactacttggccagaacacagagcaacgcaggaggtactgctggcaatcgggaactgcagttttatcagggcggacctaccaccatggccgaacaagcaaagaactggctgcccggaccttgcttccggcaacagagagtatccaagacgctggatcaaaataacaacagcaactttgcctggactggtgccacaaaataccatttaaatggaagaaattcattggttaatcccggtgtcgccatggcaacccacaaggacgacgaggaacgcttcttcccttcgagcggagttctaatttttggcaaaactggagcagctaataaaactacattagaaaacgtgctcatgacaaatgaagaagaaattcgtcctaccaacccggtagctaccgaggaatacgggattgtaagcagcaacttgcaggcggctagcaccgcagcccagacacaagttgttaacaaccagggagccttacctggcatggtctggcagaaccgggacgtgtacctgcaaggtcccatttgggccaagattcctcacacggacggcaactttcacccgtctcctctaatgggtggctttggactgaaacacccgcctccccagatcctgatcaaaaacacaccggtacctgctaatcctccagaagtgtttactcctgccaagattgcttccttcatcacgcagtacagcaccgggcaagtcagcgttgagatcgagtgggagctgcagaaagagaacagcaagcgctggaacccagagattcagtacacctccaactttgacaaacagactggagtggactttgctgttgacagccagggtgtttactctgagcct

SEQ ID NO: 50 - protein, 644 aa, Adeno-associated virus
KAYDQQLKAGDNPYLRYNHADAEFQERLQEDTSFGGNLGRAVFQAKKRVLEPLGLVETPAKTAPGKKRPVDSPDSTSGIGKKGQQPAKKRLNFGQTGDSESVPDPQPIGEPPAGPSGLGSGTMAAGGGAPMADNNEGADGVGNASGNWHCDSTWLGDRVITTSTRTWALPTYNNHLYKQISSQSAGSTNDNVYFGYSTPWGYFDFNRFHCHFSPRDWQRLINNNWGFRPKKLNFKLFNIQVKEVTTNDGVTTIANNLTSTVQVFSDPEYQLPYVLGSAHQGCLPPFPADVFMIPQYGYLTLNNGSQSVGRSSFYCLEYFPSQMLRTGNNFTFSYTFEDVPFHSSYAHSQSLDRLMNPLIDQYLYYLARTQSNAGGTAGNRELQFYQGGPTTMAEQAKNWLPGPCFRQQRVSKTLDQNNNSNFAWTGATKYHLNGRNSLVNPGVAMATHKDDEERFFPSSGVLIFGKTGAANKTTLENVLMTNEEEIRPTNPVATEEYGIVSSNLQAASTAAQTQVVNNQGALPGMVWQNRDVYLQGPIWAKIPHTDGNFHPSPLMGGFGLKHPPPQILIKNTPVPANPPEVFTPAKIASFITQYSTGQVSVEIEWELQKENSKRWNPEIQYTSNFDKQTGVDFAVDSQGVYSEP

SEQ ID NO: 51 - protein, 738 aa, Adeno-associated virus
MAADGYLPDWLEDNLSEGIREWWALKPGAPKPKANQQKQDDGRGLVLPGYKYLGPFNGLDKGEPVNAADAAALEHDKAYDQQLKAGDNPYLRYNHADAEFQERLQEDTSFGGNLGRAVFQAKKRVLEPLGLVEEGAKTAPGKKRPVEPSPQRSPDSTTGIGKKGQQPAKKRLNFGQTGDSESVPDPQPIGEPPAGPSGLGSGTMAAGGGAPMADNNEGADGVGSSSGNWHCDSTWLGDRVITTSTRTWALPTYNNHLYKQISNGTSGGSTNDNTYFGYSTPWGYFDFNRFHCHFSPRDWQRLINNNWGFRPKRLNFKLFNIQVKEVTQNEGTKTIANNLTSTIQVFTDSEYQLPYVLGSARQGCLPPFPADVFMIPQYGYLTLNNGSQAVGRSSFYCLEYFPSQMLRTGNNFEFSYQFEDVPFHSSYAHSQSLDRLMNPLIDQYLYYLSRTQSTGGTAGTQQLLFSQAGPNNMSAQAKNWLPGPCYRQQRVSTTLSQNNNSNFAWTGATKYHLNGRDSLVNPGVAMATHKDDEERFFPSSGVLMFGKQGAGKGNVDYSSVMLTSEEEIKTTNPVATEQYGVVADNLQQQNAAPIVGAVNSQGALPGMVWQNRDVYLQGPIWAKIPHTDGNFHPSPLMGGFGLKHPPPQILIKNTPVPADPPTTFSQAKLASFITQYSTGQVSVEIEWELQKENSKRWNPEIQYTSNYYKSTNVDFAVNTDGTYSEPRPIGTRYLTRNL

SEQ ID NO: 52 - DNA, 3121 bp, Adeno-associated virus
gaattcgcccttctacggctgcgtcaactggaccaatgagaactttcccttcaacgactgtgtcgacaagatggtgatctggtgggaggaggggaagatgaccgccaaggtcgtggagtcggccaaagccattctcggaggaagcaaggtgcgcgtggaccagaaatgcaagtcctcggcccagatagacccgactcccgtgatcgtcacctccaacaccaacatgtgcgccgtgattgacgggaactcaacgaccttcgaacaccagcagccgttgcaagaccggatgttcaaatttgaactcacccgccgtctggatcatgactttgggaaggtcaccaagcaggaagtcaaagactttttccggtgggcaaaggatcacgtggttgaggtggagcacgaattctacgtcaaaaagggtggagccaagaaaagacccgcccccagtgacgcagatataagtgagcccaaacgggtgcgcgagtcagttgcgcagccatcgacgtcagacgcggaagcttcgatcaactacgcagacaggtaccaaaacaaatgttctcgtcacgcgggcatgaatctgatgctgtttccctgcagacaatgcgagagaatgaatcagaattcaaatatctgcttcactcacggacagaaagactgtttagagtgctttcccgtgtcagaatctcaacccgtttctgtcgtcaaaaaggcgtatcagaaactgtgctacattcatcatatcatgggaaaggtgccagacgcttgcactgcctgcgatctggtcgatgtggatttggatgactgcatctttgaacaataaatgatttaaatcaggtatggctgccgatggttatcttccagattggctcgaggacaacctctctgagggcattcgcgagtggtgggcgctgaaacctggagccccgaagcccaaagccaaccagcaaaagcaggacggcggccggggtctggtgcttcctggctacaagtacctcggacccttcaacggactcgacaagggggagcccgtcaacgcggcggacgcagcggccctcgagcacgacaaggcctacgaccagcagctcaaagcgggtgacaatccgtacctgcggtataaccacgccgacgccgagtttcaggagcgtctgcaagaagatacgtcttttgggggcaacctcgggcgagcagtcttccaggccaagaagcgggttctcgaacctctcggtctggttgaggaaggcgctaagacggctcctggaaagaagagaccggtagagccatcaccccagcgttctccagactcctctacgggcatcggcaagaaaggccagcagcccgcgaaaaagagactcaactttgggcagactggcgactcagagtcagtgcccgaccctcaaccaatcggagaaccccccgcaggcccctctggtctgggatctggtacaatggctgcaggcggtggcgctccaatggcagacaataacgaaggcgccgacggagtgggtagttcctcaggaaattggcattgcgattccacatggctgggcgactgagtcatcaccaccagcacccgaacctgggccctccccacctacaacaaccacctctacaagcaaatctccaacgggacttcgggaggaagcaccaacgacaacacctacttcggctacagcaccccctgggggtattttgactttaacagattccactgccacttctcaccacgtgactggcagcgactcatcaacaacaactggggattccggcccaagagactcaacttcaagctcttcaacatccaggtcaaggaggtcacgcagaatgaaggcaccaagaccatcgccaataaccttaccagcacgattcaggtctttacggactcggaataccagctcccgtacgtcctcggctctgcgcaccagggctgcctgcctccgttcccggcggacgtcttcatgattcctcagtacgggtacctgactctgaacaatggcagtcaggccgtgggccgttcctccttctactgcctggagtactttccttctcaaatgctgagaacgggcaacaactttgagttcagctaccagtttgaggacgtgccttttcacagcagctacgcgcacagccaaagcctggaccggctgatgaaccccctcatcgaccagtacctgtactacctgtctcggactcagtccacgggaggtaccgcaggaactcagcagttgctattttctcaggccgggcctaataacatgtcggctcaggccaaaaactggctacccgggccctgctaccggcagtaacgcgtctccacgacactgtcgcaaaataacaacagcaactttgtctggaccggtgccaccaagtatcatctgaatggcagagactctctggtagatcccggtgtcgctatggcaacccacaaggacgacgaagagcgattttttccgtccagcggagtcataatgtttgggaaacagggagctggaaaagacaacgtggactatagcagcgtcatgctaaccagtgaggaagaaattaaaaccaccaacccagtggccacagaacagtacggcgtggtggccgataacctgcaacagcaaaacgccgctcctattgtaggggccgtcaacagtcaaggagccttacctggcatggtctggcagaaccgggacgtgtacctgcagggtcctacctgggccaagattcctcacacggacggaaactttcatccctcgccgctgatgggaggctttggactgaaacacccgcctcctcagatcctgattaagaatacacctgttcccgcggatcctccaactaccttcagtcaagctaagctggcgtcgttcatcacgcagtacagcaccggacaggtcagcgtggaaattgaatgggagctgcaggaagaaaacagcaaacgctggaacccagagattcaatacacttccaactactacaaatctacaaatgtggactttgctgttaacacagatggcacttattctgagcctcgccccatcggcacccgttacctcacccgtaatctgtaattgcttgttaatcaataaaccggttgattcgtttcagttgaactttggtctctgcgaagggcgaattc

SEQ ID NO: 53 - protein, 738 aa, Adeno-associated virus
MAADGYLPDWLEDNLSEGIREWWALKPGAPKPKANQQKQDDGRGLVLPGYKYLGPFNGLDKGEPVNAADAAALEHDKAYDQQLKAGDNPYLRYNHADAEFQERLQEDTSFGGNLGRAVFQAKKRVLEPLGLVEEGAKTAPGKKRPVEPSPQRSPDSSTGIGKKGQQPAKKRLNFGQTGDSESVPDPQPIGEPPAGPSGLGSGTMAAGGGAPMADNNEGADGVGSSSGNWHCDSTWLGDGVITTSTRTWALPTYNNHLYKQISNGTSGGSTNDNTYFGYSTPWGYFDFNRFHCHFSPRDWQRLINNNWGFRPKSLNFKLFNIQVKEVTQNEGTKTIANNLTSTIQVFTDSEYQLPYVLGSAHQGCLPPFPADVFMIPQYGYLTLNNGSQAVGRSSFYCLEYFPSQMLRTGNNFEFSYQFEDVPFHSSYAHSQSLDRLMNPLIDQYLYYLSRTQSTGGTAGTQQLLFSQAGPNNMSAQAKNWLPGPCYRQQRVSTTLSQNDNSNFAWTGATKYHLNGRDSLVNPGVAMATHKDDEERFFPSSGVLMFGKQGAGKDNVDYSSVMLTSEEEIKTTNPVATEQYGVVADNLQQQNAAPIVGAVNSQGALPGMVWQNRDVYLQGPIWAKIPHTDGNFHPSPLMGGFGLKHPPPQILIKNTPVPADPPTTFSQAKLASFITQYSTGQVSVEIEWELQKENSKRWNPEIQYTSNYYKSTNVDFAVNTDGTYSEPRPIGTRYLTRNL

SEQ ID NO: 54 - DNA, 3121 bp, Adeno-associated virus
gaattcgcccttcgcgagaccaaagttcaactgaaacgaatcaaccggtttattgattaacaagcaattacagattacgggtgaggtaacgggtgccgatggggcgaggctcagaataagtgccatctgtgttaacagcaaagtccacatttgtagatttgtagtagttggaagtgtattgaatctctgggttccagcgtttgctgttttctttctgcagctcccattcaatttccacgctgacctgtccggtgctgtactgcgtgatgaacgacgccagcttagcttgactgaaggtagttggaggatccgcgggaacaggtgtattcttaatcaggatctgaggaggcgggtgtttcagtccaaagcctcccatcagcggcgagggatgaaagtttccgtccgtgtgaggaatcttggcccagataggaccctgcaggtacacgtcccggttctgccagaccatgccaggtaaggctccttgactgttgacggcccctacaataggagcggcgttttgctgttgcaggttatcggccaccacgccgtactgttctgtggccactgggttggtggttttaatttcttcctcactggttagcataacgctgctatagtccacgttgtcttttccagctccctgtttcccaaacattaagactccgctggacggaaaaaatcgctcttcgtcgtccttgtgggttgccatagcgacaccgggatttaccagagagtctctgccattcagatgatacttggtggcaccggtccaggcaaagttgctgttgtcattttgcgacagtgtcgtggagacgcgttgctgccggtagcagggcccgggtagccagtttttggcctgagccgacatgttattaggcccggcctgagaaaatagcaactgctgagttcctgcggtacctcccgtggactgagtccgagacaggtagtacaggtactggtcgatgagggggttcatcagccggtccaggctttggctgtgcgcgtagctgctgtgaaaaggcacgtcctcaaactggtagctgaactcaaagttgttgcccgttctcagcatttgagaaggaaagtactccaggcagtagaaggaggaacggcccacggcctgactgccattgttcagagtcaggtacccgtactgaggaatcatgaagacgtccgccgggaacggaggcaggcagccctggtgcgcagagccgaggacgtacgggagctggtattccgagtccgtaaagacctgaatcgtgctggtaaggttattggcgatggtcttggtgccttcattctgcgtgacctccttgacctggatgttgaagagcttgaagttgaggctcttgggccggaatccccagttgttgttgatgagtcgctgccagtcacgtggtgagaagtggcagtggaatctgttaaagtcaaaatacccccagggggtgctgtagccgaagtaggtgttgtcgttggtgcttcctcccgaagtcccgttggagatttgcttgtagaggtggttgttgtaggtggggagggcccaggttcgggtgctggtggtgatgactccgtcgcccagccatgtggaatcgcaatgccaatttcctgaggaactacccactccgtcggcgccttcgttattgtctgccattggagcgccaccgcctgcagccattgtaccagatcccagaccagaggggcctgcggggggttctccgattggttgagggtcgggcactgactctgagtcgccagtctgcccaaagttgagtctctttttcgcgggctgctggcctttcttgccgatgcccgtagaggagtctggagaacgctggggtgatggctctaccggtctcttctttccaggagccgtcttagcgccttcctcaaccagaccgagaggttcgagaacccgcttcttggcctggaagactgctcgcccgaggttgcccccaaaagacgtatcttcttgcagacgctcctgaaactcggcgtcggcgtggttataccgcaggtacggattgtcacccgctttgagctgctggtcgtaggccttgtcgtgctcgagggccgctgcgtccgccgcgttgacgggctcccccttgtcgagtccgttgaagggtccgaggtacttgtagccaggaagcaccagaccccggccgtcgtcctgcttttgctggttggctttgggcttcggggctccaggtttcagcgcccaccactcgcgaatgccctcagagaggttgtcctcgagccaatctggaagataaccatcggcagccatacctgatttaaatcatttattgttcaaagatgcagtcatccaaatccacattgaccagatcgcaggcagtgcaagcgtctggcacctttcccatgatatgatgaatgtagcacagtttctgatacgcctttttgacgacagaaacgggttgagattctgacacgggaaagcactctaaacagtctttctgtccgtgagtgaagcagatatttgaattctgattcattctctcgcattgtctgcagggaaacagcatcagattcatgcccacgtgacgagaacatttgttttggtacctgtctgcgtagttgatcgaagcttccgcgtctgacgtcgatggctgcgcaactgactcgcgcacccgtttgggctcacttatatctgcgtcactgggggcgggtcttttcttggctccaccctttttgacgtagaattcatgctccacctcaaccacgtgatcctttgcccaccggaaaaagtctttgacttcctgcttggtgaccttcccaaagtcatgatccagacggcgggtgagttcaaatttgaacatccggtcttgcaacggctgctggtgttcgaaggtcgttgagttcccgtcaatcacggcgcacatgttggtgttggaggtgacgatcacgggagtcgggtctatctgggccgaggacttgcatttctggtccacgcgcaccttgcttcctccgagaatggctttggccgactccacgaccttggcggtcatcttcccctcctcccaccagatcaccatcttgtcgacacagtcgttgaagggaaagttctcattggtccagttgacgcagccgtagaaagggcgaattc

SEQ ID NO: 55 - DNA, 2211 bp, Adeno-associated virus
atggctgctgacggttatcttccagattggctcgaggacaacctttctgaaggcattcgtgagtggtgggctctgaaacctggagtccctcaacccaaagcgaaccaacaacaccaggacaaccgtcggggtcttgtgcttccgggttacaaatacctcggacccggtaacggactcgacaaaggagagccggtcaacgaggcggacgcggcagccctcgaacacgacaaagcttacgaccagcagctcaaggccggtgacaacccgtacctcaagtacaaccacgccgacgccgagtttcaggagcgtcttcaagaagatacgtcttttgggggcaaccttggcagagcagtcttccaggccaaaaagaggatccttgagcctcttggtctggttgaggaagcagctaaaacggctcctggaaagaagggggctgtagatcagtctcctcaggaaccggactcatcatctggtgttggcaaatcgggcaaacagcctgccagaaaaagactaaatttcggtcagactggagactcagagtcagtcccagaccctcaacctctcggagaaccaccagcagcccccacaagtttgggatctaatacaatggcttcaggcggtggcgcaccaatggcagacaataacgagggtgccgatggagtgggtaattcctcaggaaattggcattgcgattcccaatggctgggcgacagagtcatcaccaccagcaccagaacctgggccctgcccacttacaacaaccatctctacaagcaaatctccagccaatcaggagcttcaaacgacaaccactactttggctacagcaccccttgggggtattttgactttaacagattccactgccacttctcaccacgtgactggcagcgactcattaacaacaactggggattccggcccaagaaactcagcttcaagctcttcaacatccaagttagaggggtcacgcagaacgatggcacgacgactattgccaataaccttaccagcacggttcaagtgtttacggactcggagtatcagctcccgtacgtgctcgggtcggcgcaccaaggctgtctcccgccgtttccagcggacgtcttcatggtccctcagtatggatacctcaccctgaacaacggaagtcaagcggtgggacgctcatccttttactgcctggagtacttcccttcgcagatgctaaggactggaaataacttccaattcagctataccttcgaggatgtaccttttcacagcagctacgctcacagccagagtttggatcgcttgatgaatcctcttattgatcagtatctgtactacctgaacagaacgcaaggaacaacctctggaacaaccaaccaatcacggctgctttttagccaggctgggcctcagtctatgtctttgcaggccagaaattggctacctgggccctgctaccggcaacagagactttcaaagactgctaacgacaacaacaacagtaactttccttggacagcggccagcaaatatcatctcaatggccgcgactcgctggtgaatccaggaccagctatggccagtcacaaggacgatgaagaaaaatttttccctatgcacggcaatctaatatttggcaaagaagggacaacggcaagtaacgcagaattagataatgtaatgattacggatgaagaagagattcgtaccaccaatcctgtggcaacagagcagtatggaactgtggcaaataacttgcagagctcaaatacagctcccacgactggaactgtcaatcatcagggggccttacctggcatggtgtggcaagatcgtgacgtgtaccttcaaggacctatctgggcaaagattcctcacacggatggacactttcatccttctcctctgatgggaggctttggactgaaacatccgcctcctcaaatcatgatcaaaaatactccggtaccggcaaatcctccgacgactttcagcccggccaagtttgcttcatttatcactcagtactccactggacaggtcagcgtggaaattgagtgggagctacagaaagaaaacagcaaacgttggaatccagagattcagtacacttccaactacaacaagtctgttaatgtggactttactgtagacactaatggtgtttatagtgaacctcgccctattggaacccggtatctcacacgaaacttgtga

SEQ ID NO: 56 - protein, 736 aa, Adeno-associated virus 3
MAADGYLPDWLEDNLSEGIREWWALKPGVPQPKANQQHQDNRRGLVLPGYKYLGPGNGLDKGEPVNEADAAALEHDKAYDQQLKAGDNPYLKYNHADAEFQERLQEDTSFGGNLGRAVFQAKKRILEPLGLVEEAAKTAPGKKGAVDQSPQEPDSSSGVGKSGKQPARKRLNFGQTGDSESVPDPQPLGEPPAAPTSLGSNTMASGGGAPMADNNEGADGVGNSSGNWHCDSQWLGDRVITTSTRTWALPTYNNHLYKQISSQSGASNDNHYFGYSTPWGYFDFNRFHCHFSPRDWQRLINNNWGFRPKKLSFKLFNIQVRGVTQNDGTTTIANNLTSTVQVFTDSEYQLPYVLGSAHQGCLPPFPADVFMVPQYGYLTLNNGSQAVGRSSFYCLEYFPSQMLRTGNNFQFSYTFEDVPFHSSYAHSQSLDRLMNPLIDQYLYYLNRTQGTTSGTTNQSRLLFSQAGPQSMSLQARNWLPGPCYRQQRLSKTANDNNNSNFPWTAASKYHLNGRDSLVNPGPAMASHKDDEEKFFPMHGNLIFGKEGTTASNAELDNVMITDEEEIRTTNPVATEQYGTVANNLQSSNTAPTTGTVNHQGALPGMVWQDRDVYLQGPIWAKIPHTDGHFHPSPLMGGFGLKHPPPQIMIKNTPVPANPPTTFSPAKFASFITQYSTGQVSVEIEWELQKENSKRWNPEIQYTSNYNKSVNVDFTVDTNGVYSEPRPIGTRYLTRNL

SEQ ID NO: 57 - DNA, 4726 bp, Adeno-associated virus 3
ttggccactccctctatgcgcactcgctcgctcggtggggcctggcgaccaaaggtcgccagacggacgtgctttgcacgtccggccccaccgagcgagcgagtgcgcatagagggagtggccaactccatcactagaggtatggcagtgacgtaacgcgaagcgcgcgaagcgagaccacgcctaccagctgcgtcagcagtcaggtgacccttttgcgacagtttgcgacaccacgtggccgctgagggtatatattctcgagtgagcgaaccaggagctccattttgaccgcgaaatttgaacgagcagcagccatgccggggttctacgagattgtcctgaaggtcccgagtgacctggacgagcgcctgccgggcatttctaactcgtttgttaactgggtggccgagaaggaatgggacgtgccgccggattctgacatggatccgaatctgattgagcaggcacccctgaccgtggccgaaaagcttcagcgcgagttcctggtggagtggcgccgcgtgagtaaggccccggaggccctcttttttgtccagttcgaaaagggggagacctacttccacctgcacgtgctgattgagaccatcggggtcaaatccatggtggtcggccgctacgtgagccagattaaagagaagctggtgacccgcatctaccgcggggtcgagccgcagcttccgaactggttcgcggtgaccaaaacgcgaaatggcgccgggggcgggaacaaggtggtggacgactgctacatccccaactacctgctccccaagacccagcccgagctccagtgggcgtggactaacatggaccagtatttaagcgcctgtttgaatctcgcggagcgtaaacggctggtggcgcagcatctgacgcacgtgtcgcagacgcaggagcagaacaaagagaatcagaaccccaattctgacgcgccggtcatcaggtcaaaaacctcagccaggtacatggagctggtcgggtggctggtggaccgcgggatcacgtcagaaaagcaatggattcaggaggaccaggcctcgtacatctccttcaacgccgcctccaactcgcggtcccagatcaaggccgcgctggacaatgcctccaagatcatgagcctgacaaagacggctccggactacctggtgggcagcaacccgccggaggacattaccaaaaatcggatctaccaaatcctggagctgaacgggtacgatccgcagtacgcggcctccgtcttcctgggctgggcgcaaaagaagttcgggaagaggaacaccatctggctctttgggccggccacgacgggtaaaaccaacatcgcggaagccatcgcccacgccgtgcccttctacggctgcgtaaactggaccaatgagaactttcccttcaacgattgcgtcgacaagatggtgatctggtgggaggagggcaagatgacggccaaggtcgtggagagcgccaaggccattctgggcggaagcaaggtgcgcgtggaccaaaagtgcaagtcatcggcccagatcgaacccactcccgtgatcgtcacctccaacaccaacatgtgcgccgtgattgacgggaacagcaccaccttcgagcatcagcagccgctgcaggaccggatgtttgaatttgaacttacccgccgtttggaccatgactttgggaaggtcaccaaacaggaagtaaaggactttttccggtgggcttccgatcacgtgactgacgtggctcatgagttctacgtcagaaagggtggagctaagaaacgccccgcctccaatgacgcggatgtaagcgagccaaaacgggagtgcacgtcacttgcgcagccgacaacgtcagacgcggaagcaccggcggactacgcggacaggtaccaaaacaaatgttctcgtcacgtgggcatgaatctgatgctttttccctgtaaaacatgcgagagaatgaatcaaatttccaatgtctgttttacgcatggtcaaagagactgtggggaatgcttccctggaatgtcagaatctcaacccgtttctgtcgtcaaaaagaagacttatcagaaactgtgtccaattcatcatatcctgggaagggcacccgagattgcctgttcggcctgcgatttggccaatgtggacttggatgactgtgtttctgagcaataaatgacttaaaccaggtatggctgctgacggttatcttccagattggctcgaggacaacctttctgaaggcattcgtgagtggtgggctctgaaacctggagtccctcaacccaaagcgaaccaacaacaccaggacaaccgtcggggtcttgtgcttccgggttacaaatacctcggacccggtaacggactcgacaaaggagagccggtcaacgaggcggacgcggcagccctcgaacacgacaaagcttacgaccagcagctcaaggccggtgacaacccgtacctcaagtacaaccacgccgacgccgagtttcaggagcgtcttcaagaagatacgtcttttgggggcaaccttggcagagcagtcttccaggccaaaaagaggatccttgagcctcttggtctggttgaggaagcagctaaaacggctcctggaaagaagggggctgtagatcagtctcctcaggaaccggactcatcatctggtgttggcaaatcgggcaaacagcctgccagaaaaagactaaatttcggtcagactggagactcagagtcagtcccagaccctcaacctctcggagaaccaccagcagcccccacaagtttgggatctaatacaatggcttcaggcggtggcgcaccaatggcagacaataacgagggtgccgatggagtgggtaattcctcaggaaattggcattgcgattcccaatggctgggcgacagagtcatcaccaccagcaccagaacctgggccctgcccacttacaacaaccatctctacaagcaaatctccagccaatcaggagcttcaaacgacaaccactactttggctacagcaccccttgggggtattttgactttaacagattccactgccacttctcaccacgtgactggcagcgactcattaacaacaactggggattccggcccaagaaactcagcttcaagctcttcaacatccaagttagaggggtcacgcagaacgatggcacgacgactattgccaataaccttaccagcacggttcaagtgtttacggactcggagtatcagctcccgtacgtgctcgggtcggcgcaccaaggctgtctcccgccgtttccagcggacgtcttcatggtccctcagtatggatacctcaccctgaacaacggaagtcaagcggtgggacgctcatccttttactgcctggagtacttcccttcgcagatgctaaggactggaaataacttccaattcagctataccttcgaggatgtaccttttcacagcagctacgctcacagccagagtttggatcgcttgatgaatcctcttattgatcagtatctgtactacctgaacagaacgcaaggaacaacctctggaacaaccaaccaatcacggctgctttttagccaggctgggcctcagtctatgtctttgcaggccagaaattggctacctgggccctgctaccggcaacagagactttcaaagactgctaacgacaacaacaacagtaactttccttggacagcggccagcaaatatcatctcaatggccgcgactcgctggtgaatccaggaccagctatggccagtcacaaggacgatgaagaaaaatttttccctatgcacggcaatctaatatttggcaaagaagggacaacggcaagtaacgcagaattagataatgtaatgattacggatgaagaagagattcgtaccaccaatcctgtggcaacagagcagtatggaactgtggcaaataacttgcagagctcaaatacagctcccacgactggaactgtcaatcatcagggggccttacctggcatggtgtggcaagatcgtgacgtgtaccttcaaggacctatctgggcaaagattcctcacacggatggacactttcatccttctcctctgatgggaggctttggactgaaacatccgcctcctcaaatcatgatcaaaaatactccggtaccggcaaatcctccgacgactttcagcccggccaagtttgcttcatttatcactcagtactccactggacaggtcagcgtggaaattgagtgggagctacagaaagaaaacagcaaacgttggaatccagagattcagtacacttccaactacaacaagtctgttaatgtggactttactgtagacactaatggtgtttatagtgaacctcgccctattggaacccggtatctcacacgaaacttgtgaatcctggttaatcaataaaccgtttaattcgtttcagttgaactttggctcttgtgcacttctttatctttatcttgtttccatggctactgcgtagataagcagcggcctgcggcgcttgcgcttcgcggtttacaactgctggttaatatttaactctcgccatacctctagtgatggagttggccactccctctatgcgcactcgctcgctcggtggggcctggcgaccaaaggtcgccagacggacgtgctttgcacgtccggccccaccgagcgagcgagtgcgcatagagggagtggccaa

SEQ ID NO: 58 - protein, 737 aa, Adeno-associated virus
MAADGYLPDWLEDNLSEGIREWWDLKPGAPKPKANQQKQDNGRGLVLPGYKYLGPFNGLDKGEPVNAADAAALEHDKAYDQQLNAGDNPYLRYNHADAEFQERLQEDTSFGGNLGRAVFQAKKRVLEPLGLVEEGAKTAPAKKRPVEPSPQRSPDSSTGIGKKGQQPARKRLNFGQTGDSESVPDPQPLGEPPAAPSSVGSGTVAAGGGAPMADNNEGADGVGNASGNWHCDSTWLGDRVITTSTRTWALPTYNNHLYEQISSETAGSTNDNTYFGYSTPWGYFDFNRFHCHFSPRDWQRLINNNWGFRPKKLRFKLFNIQVKEVTTNDGVTTIANNLTSTIQVFSDSEYQLPYVLGSAHQGCLPPFPADVFMIPQYGYLTLNNGSQSVGRSSFYCLEYFPSQMLRTGNNFEFSYSFEDVPFHSSYAHSQSLDRLMNPLIDQYLYYLARTQSDPGGTAGNRELQFYQGGPSTMAEQAKNWLPGPCFRQQRVSKTLDQNNNSNFAWTGATKYHLNGRNSLVNPGVAMATHKDDEDRFFPSSGVLIFGKTGATNKTTLENVLMTNEEEIRPTNPVATEEYGIVSSNLQAANTAAQTQVVNNQGALPGMVWQNRDVYLQGPIWAKIPHTDGNFHPSPLMGGFGLKHPPPQILIKNTPVPANPPEVFTPAKFASFITQYSTGQVSVEIEWELQKENSKRWDPEIQYTSNFEKQTGVDFAVDSQGVYSEPRPIGTRYLTRNL

SEQ ID NO: 59 - DNA, 2211 bp, Adeno-associated virus
atggctgctgacggttatcttccagattggctcgaggacaacctttctgaaggcattcgtgagtggtgggctctgaaacctggagtccctcaacccaaagcgaaccaacaacaccaggacaaccgtcggggtcttgtgcttccgggttacaaatacctcggacccggtaacggactcgacaaaggagagccggtcaacgaggcggacgcggcagccctcgaacacgacaaagcttacgaccagcagctcaaggccggtgacaacccgtacctcaagtacaaccacgccgacgccgagtttcaggagcgtcttcaagaagatacgtcttttgggggcaaccttggcagagcagtcttccaggccaaaaagaggatccttgagcctcttggtctggttgaggaagcagctaaaacggctcctggaaagaagggggctgtagatcagtctcctcaggaaccggactcatcatctggtgttggcaaatcgggcaaacagcctgccagaaaaagactaaatttcggtcagactggagactcagagtcagtcccagaccctcaacctctcggagaaccaccagcagcccccacaagtttgggatctaatacaatggcttcaggcggtggcgcaccaatggcagacaataacgagggtgccgatggagtgggtaattcctcaggaaattggcattgcgattcccaatggctgggcgacagagtcatcaccaccagcaccagaacctgggccctgcccacttacaacaaccatctctacaagcaaatctccagccaatcaggagcttcaaacgacaaccactactttggctacagcaccccttgggggtattttgactttaacagattccactgccacttctcaccacgtgactggcagcgactcattaacaacaactggggattccggcccaagaaactcagcttcaagctcttcaacatccaagttagaggggtcacgcagaacgatggcacgacgactattgccaataaccttaccagcacggttcaagtgtttacggactcggagtatcagctcccgtacgtgctcgggtcggcgcaccaaggctgtctcccgccgtttccagcggacgtcttcatggtccctcagtatggatacctcaccctgaacaacggaagtcaagcggtgggacgctcatccttttactgcctggagtacttcccttcgcagatgctaaggactggaaataacttccaattcagctataccttcgaggatgtaccttttcacagcagctacgctcacagccagagtttggatcgcttgatgaatcctcttattgatcagtatctgtactacctgaacagaacgcaaggaacaacctctggaacaaccaaccaatcacggctgctttttagccaggctgggcctcagtctatgtctttgcaggccagaaattggctacctgggccctgctaccggcaacagagactttcaaagactgctaacgacaacaacaacagtaactttccttggacagcggccagcaaatatcatctcaatggccgcgactcgctggtgaatccaggaccagctatggccagtcacaaggacgatgaagaaaaatttttccctatgcacggcaatctaatatttggcaaagaagggacaacggcaagtaacgcagaattagataatgtaatgattacggatgaagaagagattcgtaccaccaatcctgtggcaacagagcagtatggaactgtggcaaataacttgcagagctcaaatacagctcccacgactggaactgtcaatcatcagggggccttacctggcatggtgtggcaagatcgtgacgtgtaccttcaaggacctatctgggcaaagattcctcacacggatggacactttcatccttctcctctgatgggaggctttggactgaaacatccgcctcctcaaatcatgatcaaaaatactccggtaccggcaaatcctccgacgactttcagcccggccaagtttgcttcatttatcactcagtactccactggacaggtcagcgtggaaattgagtgggagctacagaaagaaaacagcaaacgttggaatccagagattcagtacacttccaactacaacaagtctgttaatgtggactttactgtagacactaatggtgtttatagtgaacctcgccctattggaacccggtatctcacacgaaacttgtaa

SEQ ID NO: 60 - protein, 736 aa, Adeno-associated virus; identical to SEQ ID NO: 56

SEQ ID NO: 61 - protein, 736 aa, Adeno-associated virus 3A; identical to SEQ ID NO: 56

SEQ ID NO: 62 - protein, 624 aa, Adeno-associated virus 3A
MPGFYEIVLKVPSDLDERLPGISNSFVNWVAEKEWDVPPDSDMDPNLIEQAPLTVAEKLQREFLVEWRRVSKAPEALFFVQFEKGETYFHLHVLIETIGVKSMVVGRYVSQIKEKLVTRIYRGVEPQLPNWFAVTKTRNGAGGGNKVVDDCYIPNYLLPKTQPELQWAWTNMDQYLSACLNLAERKRLVAQHLTHVSQTQEQNKENQNPNSDAPVIRSKTSARYMELVGWLVDRGITSEKQWIQEDQASYISFNAASNSRSQIKAALDNASKIMSLTKTAPDYLVGSNPPEDITKNRIYQILELNGYDPQYAASVFLGWAQKKFGKRNTIWLFGPATTGKTNIAEAIAHAVPFYGCVNWTNENFPFNDCVDKMVIWWEEGKMTAKVVESAKAILGGSKVRVDQKCKSSAQIEPTPVIVTSNTNMCAVIDGNSTTFEHQQPLQDRMFEFELTRRLDHDFGKVTKQEVKDFFRWASDHVTDVAHEFYVRKGGAKKRPASNDADVSEPKRECTSLAQPTTSDAEAPADYADRYQNKCSRHVGMNLMLFPCKTCERMNQISNVCFTHGQRDCGECFPGMSESQPVSVVKKKTYQKLCPIHHILGRAPEIACSACDLANVDLDDCVSEQ

SEQ ID NO: 63 - protein, 736 aa, Adeno-associated virus 3B
MAADGYLPDWLEDNLSEGIREWWALKPGVPQPKANQQHQDNRRGLVLPGYKYLGPGNGLDKGEPVNEADAAALEHDKAYDQQLKAGDNPYLKYNHADAEFQERLQEDTSFGGNLGRAVFQAKKRILEPLGLVEEAAKTAPGKKRPVDQSPQEPDSSSGVGKSGKQPARKRLNFGQTGDSESVPDPQPLGEPPAAPTSLGSNTMASGGGAPMADNNEGADGVGNSSGNWHCDSQWLGDRVITTSTRTWALPTYNNHLYKQISSQSGASNDNHYFGYSTPWGYFDFNRFHCHFSPRDWQRLINNNWGFRPKKLSFKLFNIQVKEVTQNDGTTTIANNLTSTVQVFTDSEYQLPYVLGSAHQGCLPPFPADVFMVPQYGYLTLNNGSQAVGRSSFYCLEYFPSQMLRTGNNFQFSYTFEDVPFHSSYAHSQSLDRLMNPLIDQYLYYLNRTQGTTSGTTNQSRLLFSQAGPQSMSLQARNWLPGPCYRQQRLSKTANDNNNSNFPWTAASKYHLNGRDSLVNPGPAMASHKDDEEKFFPMHGNLIFGKEGTTASNAELDNVMITDEEEIRTTNPVATEQYGTVANNLQSSNTAPTTRTVNDQGALPGMVWQDRDVYLQGPIWAKIPHTDGHFHPSPLMGGFGLKHPPPQIMIKNTPVPANPPTTFSPAKFASFITQYSTGQVSVEIEWELQKENSKRWNPEIQYTSNYNKSVNVDFTVDTNGVYSEPRPIGTRYLTRNL

SEQ ID NO: 64 - protein, 624 aa, Adeno-associated virus 3B
MPGFYEIVLKVPSDLDEHLPGISNSFVNWVAEKEWELPPDSDMDPNLIEQAPLTVAEKLQREFLVEWRRVSKAPEALFFVQFEKGETYFHLHVLIETIGVKSMVVGRYVSQIKEKLVTRIYRGVEPQLPNWFAVTKTRNGAGGGNKVVDDCYIPNYLLPKTQPELQWAWTNMDQYLSACLNLAERKRLVAQHLTHVSQTQEQNKENQNPNSDAPVIRSKTSARYMELVGWLVDRGITSEKQWIQEDQASYISFNAASNSRSQIKAALDNASKIMSLTKTAPDYLVGSNPPEDITKNRIYQILELNGYDPQYAASVFLGWAQKKFGKRNTIWLFGPATTGKTNIAEAIAHAVPFYGCVNWTNENFPFNDCVDKMVIWWEEGKMTAKVVESAKAILGGSKVRVDQKCKSSAQIEPTPVIVTSNTNMCAVIDGNSTTFEHQQPLQDRMFKFELTRRLDHDFGKVTKQEVKDFFRWASDHVTDVAHEFYVRKGGAKKRPASNDADVSEPKRQCTSLAQPTTSDAEAPADYADRYQNKCSRHVGMNLMLFPCKTCERMNQISNVCFTHGQRDCGECFPGMSESQPVSVVKKKTYQKLCPIHHILGRAPEIACSACDLANVDLDDCVSEQ

SEQ ID NO: 65 - DNA, 4722 bp, Adeno-associated virus 3B
tggccactccctctatgcgcactcgctcgctcggtggggcctggcgaccaaaggtcgccagacggacgtgctttgcacgtccggccccaccgagcgagcgagtgcgcatagagggagtggccaactccatcactagaggtatggcagtgacgtaacgcgaagcgcgcgaagcgagaccacgcctaccagctgcgtcagcagtcaggtgacccttttgcgacagtttgcgacaccacgtggccgctgagggtatatattctcgagtgagcgaaccaggagctccattttgaccgcgaaatttgaacgagcagcagccatgccggggttctacgagattgtcctgaaggtcccgagtgacctggacgagcacctgccgggcatttctaactcgtttgttaactgggtggccgagaaggaatgggagctgccgccggattctgacatggatccgaatctgattgagcaggcacccctgaccgtggccgaaaagcttcagcgcgagttcctggtggagtggcgccgcgtgagtaaggccccggaggccctcttttttgtccagttcgaaaagggggagacctacttccacctgcacgtgctgattgagaccatcggggtcaaatccatggtggtcggccgctacgtgagccagattaaagagaagctggtgacccgcatctaccgcggggtcgagccgcagcttccgaactggttcgcggtgaccaaaacgcgaaatggcgccgggggcgggaacaaggtggtggacgactgctacatccccaactacctgctccccaagacccagcccgagctccagtgggcgtggactaacatggaccagtatttaagcgcctgtttgaatctcgcggagcgtaaacggctggtggcgcagcatctgacgcacgtgtcgcagacgcaggagcagaacaaagagaatcagaaccccaattctgacgcgccggtcatcaggtcaaaaacctcagccaggtacatggagctggtcgggtggctggtggaccgcgggatcacgtcagaaaagcaatggattcaggaggaccaggcctcgtacatctccttcaacgccgcctccaactcgcggtcccagatcaaggccgcgctggacaatgcctccaagatcatgagcctgacaaagacggctccggactacctggtgggcagcaacccgccggaggacattaccaaaaatcggatctaccaaatcctggagctgaacgggtacgatccgcagtacgcggcctccgtcttcctgggctgggcgcaaaagaagttcgggaagaggaacaccatctggctctttgggccggccacgacgggtaaaaccaacatcgcggaagccatcgcccacgccgtgcccttctacggctgcgtaaactggaccaatgagaactttcccttcaacgattgcgtcgacaagatggtgatctggtgggaggagggcaagatgacggccaaggtcgtggagagcgccaaggccattctgggcggaagcaaggtgcgcgtggaccaaaagtgcaagtcatcggcccagatcgaacccactcccgtgatcgtcacctccaacaccaacatgtgcgccgtgattgacgggaacagcaccaccttcgagcatcagcagccgctgcaggaccggatgtttaaatttgaacttacccgccgtttggaccatgactttgggaaggtcaccaaacaggaagtaaaggactttttccggtgggcttccgatcacgtgactgacgtggctcatgagttctacgtcagaaagggtggagctaagaaacgccccgcctccaatgacgcggatgtaagcgagccaaaacggcagtgcacgtcacttgcgcagccgacaacgtcagacgcggaagcaccggcggactacgcggacaggtaccaaaacaaatgttctcgtcacgtgggcatgaatctgatgctttttccctgtaaaacatgcgagagaatgaatcaaatttccaatgtctgttttacgcatggtcaaagagactgtggggaatgcttccctggaatgtcagaatctcaacccgtttctgtcgtcaaaaagaagacttatcagaaactgtgtccaattcatcatatcctgggaagggcacccgagattgcctgttcggcctgcgatttggccaatgtggacttggatgactgtgtttctgagcaataaatgacttaaaccaggtatggctgctgacggttatcttccagattggctcgaggacaacctttctgaaggcattcgtgagtggtgggctctgaaacctggagtccctcaacccaaagcgaaccaacaacaccaggacaaccgtcggggtcttgtgcttccgggttacaaatacctcggacccggtaacggactcgacaaaggagagccggtcaacgaggcggacgcggcagccctcgaacacgacaaagcttacgaccagcagctcaaggccggtgacaacccgtacctcaagtacaaccacgccgacgccgagtttcaggagcgtcttcaagaagatacgtcttttgggggcaaccttggcagagcagtcttccaggccaaaaagaggatccttgagcctcttggtctggttgaggaagcagctaaaacggctcctggaaagaagaggcctgtagatcagtctcctcaggaaccggactcatcatctggtgttggcaaatcgggcaaacagcctgccagaaaaagactaaatttcggtcagactggcgactcagagtcagtcccagaccctcaacctctcggagaaccaccagcagcccccacaagtttgggatctaatacaatggcttcaggcggtggcgcaccaatggcagacaataacgagggtgccgatggagtgggtaattcctcaggaaattggcattgcgattcccaatggctgggcgacagagtcatcaccaccagcaccagaacctgggccctgcccacttacaacaaccatctctacaagcaaatctccagccaatcaggagcttcaaacgacaaccactactttggctacagcaccccttgggggtattttgactttaacagattccactgccacttctcaccacgtgactggcagcgactcattaacaacaactggggattccggcccaagaaactcagcttcaagctcttcaacatccaagttaaagaggtcacgcagaacgatggcacgacgactattgccaataaccttaccagcacggttcaagtgtttacggactcggagtatcagctcccgtacgtgctcgggtcggcgcaccaaggctgtctcccgccgtttccagcggacgtcttcatggtccctcagtatggatacctcaccctgaacaacggaagtcaagcggtgggacgctcatccttttactgcctggagtacttcccttcgcagatgctaaggactggaaataacttccaattcagctataccttcgaggatgtaccttttcacagcagctacgctcacagccagagtttggatcgcttgatgaatcctcttattgatcagtatctgtactacctgaacagaacgcaaggaacaacctctggaacaaccaaccaatcacggctgctttttagccaggctgggcctcagtctatgtctttgcaggccagaaattggctacctgggccctgctaccggcaacagagactttcaaagactgctaacgacaacaacaacagtaactttccttggacagcggccagcaaatatcatctcaatggccgcgactcgctggtgaatccaggaccagctatggccagtcacaaggacgatgaagaaaaatttttccctatgcacggcaatctaatatttggcaaagaagggacaacggcaagtaacgcagaattagataatgtaatgattacggatgaagaagagattcgtaccaccaatcctgtggcaacagagcagtatggaactgtggcaaataacttgcagagctcaaatacagctcccacgactagaactgtcaatgatcagggggccttacctggcatggtgtggcaagatcgtgacgtgtaccttcaaggacctatctgggcaaagattcctcacacggatggacactttcatccttctcctctgatgggaggctttggactgaaacatccgcctcctcaaatcatgatcaaaaatactccggtaccggcaaatcctccgacgactttcagcccggccaagtttgcttcatttatcactcagtactccactggacaggtcagcgtggaaattgagtgggagctacagaaagaaaacagcaaacgttggaatccagagattcagtacacttccaactacaacaagtctgttaatgtggactttactgtagacactaatggtgtttatagtgaacctcgccctattggaacccggtatctcacacgaaacttgtaatcctggttaatcaataaaccgtttaattcgtttcagttgaactttggctcttgtgcacttcttatcttatcttgtttccatggctactgcgtagataagcagcggcctgcggcgcttgcgcttcgcggtttacaactgctggttaatatttaactctcgccatacctctagtgatggagttggccactccctctatgcgcactcgctcgctcggtggggccggacgtgcaaagcacgtccgtctggcgacctttggtcgccaggccccaccgagcgagcgagtgcgcatagagggagtggccaa

SEQ ID NO: 66 - DNA, 1800 bp, Adeno-associated virus 4
  modified_base (342)..(342): n = a, c, t or g
  misc_feature (342)..(342): n is a, c, g, or t
acggctcctggaaagaagagaccgttgattgaatccccccagcagcccgactcctccacgggtatcggcaaaaaaggcaagcagccggctaaaaagaagctcgttttcgaagacgaaactggagcaggcgacggaccccctgagggatcaacttccggagccatgtctgatgacagtgagatgcgtgcagcagctggcggagctgcagtcgagggsggacaaggtgccgatggagtgggtaatgcctcgggtgattggcattgcgattccacctggtctgagggccacgtcacgaccaccagcaccagaacctgggtcttgcccacctacaacaaccacctntacaagcgactcggagagagcctgcagtccaacacctacaacggattctccaccccctggggatactttgacttcaaccgcttccactgccacttctcaccacgtgactggcagcgactcatcaacaacaactggggcatgcgacccaaagccatgcgggtcaaaatcttcaacatccaggtcaaggaggtcacgacgtcgaacggcgagacaacggtggctaataaccttaccagcacggttcagatctttgcggactcgtcgtacgaactgccgtacgtgatggatgcgggtcaagagggcagcctgcctccttttcccaacgacgtctttatggtgccccagtacggctactgtggactggtgaccggcaacacttcgcagcaacagactgacagaaatgccttctactgcctggagtactttccttcgcagatgctgcggactggcaacaactttgaaattacgtacagttttgagaaggtgcctttccactcgatgtacgcgcacagccagagcctggaccggctgatgaaccctctcatcgaccagtacctgtggggactgcaatcgaccaccaccggaaccaccctgaatgccgggactgccaccaccaactttaccaagctgcggcctaccaacttttccaactttaaaaagaactggctgcccgggccttcaatcaagcagcagggcttctcaaagactgccaatcaaaactacaagatccctgccaccgggtcagacagtctcatcaaatacgagacgcacagcactctggacggaagatggagtgccctgacccccggacctccaatggccacggctggacctgcggacagcaagttcagcaacagccagctcatctttgcggggcctaaacagaacggcaacacggccaccgtacccgggactctgatcttcacctctgaggaggagctggcagccaccaacgccaccgatacggacatgtggggcaacctacctggcggtgaccagagcaacagcaacctgccgaccgtggacagactgacagccttgggagccgtgcctggaatggtctggcaaaacagagacatttactaccagggtcccatttgggccaagattcctcataccgatggacactttcacccctcaccgctgattggtgggtttgggctgaaacacccgcctcctcaaatttttatcaagaacaccccggtacctgcgaatcctgcaacgaccttcagctctactccggtaaactccttcattactcagtacagcactggccaggtgtcggtgcagattgactgggagatccagaaggagcggtccaaacgctggaaccccgaggtccagtttacctccaactacggacagcaaaactctctgttgtgggctcccgatgcggctgggaaatacactgagcctagggctatcggtacccgctacctcacccaccacctgtaataa

SEQ ID NO: 67 - DNA, 2208 bp, Adeno-associated virus 4
  modified_base (750)..(750): n is a, c, t or g
  misc_feature (750)..(750): n is a, c, g, or t
atgactgacggttaccttccagattggctagaggacaacctctctgaaggcgttcgagagtggtgggcgctgcaacctggagcccctaaacccaaggcaaatcaacaacatcaggacaacgctcggggtcttgtgcttccgggttacaaatacctcggacccggcaacggactcgacaagggggaacccgtcaacgcagcggacgcggcagccctcgagcacgacaaggcctacgaccagcagctcaaggccggtgacaacccctacctcaagtacaaccacgccgacgcggagttccagcagcggcttcagggcgacacatcgtttgggggcaacctcggcagagcagtcttccaggccaaaaagagggttcttgaacctcttggtctggttgagcaagcgggtgagacggctcctggaaagaagagaccgttgattgaatccccccagcagcccgactcctccacgggtatcggcaaaaaaggcaagcagccggctaaaaagaagctcgttttcgaagacgaaactggagcaggcgacggaccccctgagggatcaacttccggagccatgtctgatgacagtgagatgcgtgcagcagctggcggagctgcagtcgagggsggacaaggtgccgatggagtgggtaatgcctcgggtgattggcattgcgattccacctggtctgagggccacgtcacgaccaccagcaccagaacctgggtcttgcccacctacaacaaccacctntacaagcgactcggagagagcctgcagtccaacacctacaacggattctccaccccctggggatactttgacttcaaccgcttccactgccacttctcaccacgtgactggcagcgactcatcaacaacaactggggcatgcgacccaaagccatgcgggtcaaaatcttcaacatccaggtcaaggaggtcacgacgtcgaacggcgagacaacggtggctaataaccttaccagcacggttcagatctttgcggactcgtcgtacgaactgccgtacgtgatggatgcgggtcaagagggcagcctgcctccttttcccaacgacgtctttatggtgccccagtacggctactgtggactggtgaccggcaacacttcgcagcaacagactgacagaaatgccttctactgcctggagtactttccttcgcagatgctgcggactggcaacaactttgaaattacgtacagttttgagaaggtgcctttccactcgatgtacgcgcacagccagagcctggaccggctgatgaaccctctcatcgaccagtacctgtggggactgcaatcgaccaccaccggaaccaccctgaatgccgggactgccaccaccaactttaccaagctgcggcctaccaacttttccaactttaaaaagaactggctgcccgggccttcaatcaagcagcagggcttctcaaagactgccaatcaaaactacaagatccctgccaccgggtcagacagtctcatcaaatacgagacgcacagcactctggacggaagatggagtgccctgacccccggacctccaatggccacggctggacctgcggacagcaagttcagcaacagccagctcatctttgcggggcctaaacagaacggcaacacggccaccgtacccgggactctgatcttcacctctgaggaggagctggcagccaccaacgccaccgatacggacatgtggggcaacctacctggcggtgaccagagcaacagcaacctgccgaccgtggacagactgacagccttgggagccgtgcctggaatggtctggcaaaacagagacatttactaccagggtcccatttgggccaagattcctcataccgatggacactttcacccctcaccgctgattggtgggtttgggctgaaacacccgcctcctcaaatttttatcaagaacaccccggtacctgcgaatcctgcaacgaccttcagctctactccggtaaactccttcattactcagtacagcactggccaggtgtcggtgcagattgactgggagatccagaaggagcggtccaaacgctggaaccccgaggtccagtttacctccaactacggacagcaaaactctctgttgtgggctcccgatgcggctgggaaatacactgagcctagggctatcggtacccgctacctcacccaccacctgtaataa

SEQ ID NO: 68 - DNA, 1872 bp, Adeno-associated virus 4
atgccggggttctacgagatcgtgctgaaggtgcccagcgacctggacgagcacctgcccggcatttctgactcttttgtgagctgggtggccgagaaggaatgggagctgccgccggattctgacatggacttgaatctgattgagcaggcacccctgaccgtggccgaaaagctgcaacgcgagttcctggtcgagtggcgccgcgtgagtaaggccccggaggccctcttctttgtccagttcgagaagggggacagctacttccacctgcacatcctggtggagaccgtgggcgtcaaatccatggtggtgggccgctacgtgagccagattaaagagaagctggtgacccgcatctaccgcggggtcgagccgcagcttccgaactggttcgcggtgaccaagacgcgtaatggcgccggaggcgggaacaaggtggtggacgactgctacatccccaactacctgctccccaagacccagcccgagctccagtgggcgtggactaacatggaccagtatataagcgcctgtttgaatctcgcggagcgtaaacggctggtggcgcagcatctgacgcacgtgtcgcagacgcaggagcagaacaaggaaaaccagaaccccaattctgacgcgccggtcatcaggtcaaaaacctccgccaggtacatggagctggtcgggtggctggtggaccgcgggatcacgtcagaaaagcaatggatccaggaggaccaggcgtcctacatctccttcaacgccgcctccaactcgcggtcacaaatcaaggccgcgctggacaatgcctccaaaatcatgagcctgacaaagacggctccggactacctggtgggccagaacccgccggaggacatttccagcaaccgcatctaccgaatcctcgagatgaacgggtacgatccgcagtacgcggcctccgtcttcctgggctgggcgcaaaagaagttcgggaagaggaacaccatctggctctttgggccggccacgacgggtaaaaccaacatcgcggaagccatcgcccacgccgtgcccttctacggctgcgtgaactggaccaatgagaactttccgttcaacgattgcgtcgacaagatggtgatctggtgggaggagggcaagatgacggccaaggtcgtagagagcgccaaggccatcctgggcggaagcaaggtgcgcgtggaccaaaagtgcaagtcatcggcccagatcgacccaactcccgtgatcgtcacctccaacaccaacatgtgcgcggtcatcgacggaaactcgaccaccttcgagcaccaacaaccactccaggaccggatgttcaagttcgagctcaccaagcgcctggagcacgactttggcaaggtcaccaagcaggaagtcaaagactttttccggtgggcgtcagatcacgtgaccgaggtgactcacgagttttacgtcagaaagggtggagctagaaagaggcccgcccccaatgacgcagatataagtgagcccaagcgggcctgtccgtcagttgcgcagccatcgacgtcagacgcggaagctccggtggactacgcggacaggtaccaaaacaaatgttctcgtcacgtgggtatgaatctgatgctttttccctgccggcaatgcgagagaatgaatcagaatgtggacatttgcttcacgcacggggtcatggactgtgccgagtgcttccccgtgtcagaatctcaacccgtgtctgtcgtcagaaagcggacgtatcagaaactgtgtccgattcatcacatcatggggagggcgcccgaggtggcctgctcggcctgcgaactggccaatgtggacttggatgactgtgacatggaacaataa

SEQ ID NO: 69 - DNA, 1611 bp, Adeno-associated virus 4
atgccggggttctacgagatcgtgctgaaggtgcccagcgacctggacgagcacctgcccggcatttctgactcttttgtgagctgggtggccgagaaggaatgggagctgccgccggattctgacatggacttgaatctgattgagcaggcacccctgaccgtggccgaaaagctgcaacgcgagttcctggtcgagtggcgccgcgtgagtaaggccccggaggccctcttctttgtccagttcgagaagggggacagctacttccacctgcacatcctggtggagaccgtgggcgtcaaatccatggtggtgggccgctacgtgagccagattaaagagaagctggtgacccgcatctaccgcggggtcgagccgcagcttccgaactggttcgcggtgaccaagacgcgtaatggcgccggaggcgggaacaaggtggtggacgactgctacatccccaactacctgctccccaagacccagcccgagctccagtgggcgtggactaacatggaccagtatataagcgcctgtttgaatctcgcggagcgtaaacggctggtggcgcagcatctgacgcacgtgtcgcagacgcaggagcagaacaaggaaaaccagaaccccaattctgacgcgccggtcatcaggtcaaaaacctccgccaggtacatggagctggtcgggtggctggtggaccgcgggatcacgtcagaaaagcaatggatccaggaggaccaggcgtcctacatctccttcaacgccgcctccaactcgcggtcacaaatcaaggccgcgctggacaatgcctccaaaatcatgagcctgacaaagacggctccggactacctggtgggccagaacccgccggaggacatttccagcaaccgcatctaccgaatcctcgagatgaacgggtacgatccgcagtacgcggcctccgtcttcctgggctgggcgcaaaagaagttcgggaagaggaacaccatctggctctttgggccggccacgacgggtaaaaccaacatcgcggaagccatcgcccacgccgtgcccttctacggctgcgtgaactggaccaatgagaactttccgttcaacgattgcgtcgacaagatggtgatctggtgggaggagggcaagatgacggccaaggtcgtagagagcgccaaggccatcctgggcggaagcaaggtgcgcgtggaccaaaagtgcaagtcatcggcccagatcgacccaactcccgtgatcgtcacctccaacaccaacatgtgcgcggtcatcgacggaaactcgaccaccttcgagcaccaacaaccactccaggaccggatgttcaagttcgagctcaccaagcgcctggagcacgactttggcaaggtcaccaagcaggaagtcaaagactttttccggtgggcgtcagatcacgtgaccgaggtgactcacgagttttacgtcagaaagggtggagctagaaagaggcccgcccccaatgacgcagatataagtgagcccaagcgggcctgtccgtcagttgcgcagccatcgacgtcagacgcggaagctccggtggactacgcggacagattggctagaggacaacctctctga

SEQ ID NO: 70 - DNA, 1872 bp, Adeno-associated virus 4; identical to SEQ ID NO: 68

SEQ ID NO: 71 - DNA, 1617 bp, Adeno-associated virus 4
  modified_base (162)..(162): n is a, c, t or g
  misc_feature (162)..(162): n is a, c, g, or t
atgcgtgcagcagctggcggagctgcagtcgagggsggacaaggtgccgatggagtgggtaatgcctcgggtgattggcattgcgattccacctggtctgagggccacgtcacgaccaccagcaccagaacctgggtcttgcccacctacaacaaccacctntacaagcgactcggagagagcctgcagtccaacacctacaacggattctccaccccctggggatactttgacttcaaccgcttccactgccacttctcaccacgtgactggcagcgactcatcaacaacaactggggcatgcgacccaaagccatgcgggtcaaaatcttcaacatccaggtcaaggaggtcacgacgtcgaacggcgagacaacggtggctaataaccttaccagcacggttcagatctttgcggactcgtcgtacgaactgccgtacgtgatggatgcgggtcaagagggcagcctgcctccttttcccaacgacgtctttatggtgccccagtacggctactgtggactggtgaccggcaacacttcgcagcaacagactgacagaaatgccttctactgcctggagtactttccttcgcagatgctgcggactggcaacaactttgaaattacgtacagttttgagaaggtgcctttccactcgatgtacgcgcacagccagagcctggaccggctgatgaaccctctcatcgaccagtacctgtggggactgcaatcgaccaccaccggaaccaccctgaatgccgggactgccaccaccaactttaccaagctgcggcctaccaacttttccaactttaaaaagaactggctgcccgggccttcaatcaagcagcagggcttctcaaagactgccaatcaaaactacaagatccctgccaccgggtcagacagtctcatcaaatacgagacgcacagcactctggacggaagatggagtgccctgacccccggacctccaatggccacggctggacctgcggacagcaagttcagcaacagccagctcatctttgcggggcctaaacagaacggcaacacggccaccgtacccgggactctgatcttcacctctgaggaggagctggcagccaccaacgccaccgatacggacatgtggggcaacctacctggcggtgaccagagcaacagcaacctgccgaccgtggacagactgacagccttgggagccgtgcctggaatggtctggcaaaacagagacatttactaccagggtcccatttgggccaagattcctcataccgatggacactttcacccctcaccgctgattggtgggtttgggctgaaacacccgcctcctcaaatttttatcaagaacaccccggtacctgcgaatcctgcaacgaccttcagctctactccggtaaactccttcattactcagtacagcactggccaggtgtcggtgcagattgactgggagatccagaaggagcggtccaaacgctggaaccccgaggtccagtttacctccaactacggacagcaaaactctctgttgtgggctcccgatgcggctgggaaatacactgagcctagggctatcggtacccgctacctcacccaccacctgtaa

SEQ ID NO: 72 - DNA, 939 bp, Adeno-associated virus 4
atggagctggtcgggtggctggtggaccgcgggatcacgtcagaaaagcaatggatccaggaggaccaggcgtcctacatctccttcaacgccgcctccaactcgcggtcacaaatcaaggccgcgctggacaatgcctccaaaatcatgagcctgacaaagacggctccggactacctggtgggccagaacccgccggaggacatttccagcaaccgcatctaccgaatcctcgagatgaacgggtacgatccgcagtacgcggcctccgtcttcctgggctgggcgcaaaagaagttcgggaagaggaacaccatctggctctttgggccggccacgacgggtaaaaccaacatcgcggaagccatcgcccacgccgtgcccttctacggctgcgtgaactggaccaatgagaactttccgttcaacgattgcgtcgacaagatggtgatctggtgggaggagggcaagatgacggccaaggtcgtagagagcgccaaggccatcctgggcggaagcaaggtgcgcgtggaccaaaagtgcaagtcatcggcccagatcgacccaactcccgtgatcgtcacctccaacaccaacatgtgcgcggtcatcgacggaaactcgaccaccttcgagcaccaacaaccactccaggaccggatgttcaagttcgagctcaccaagcgcctggagcacgactttggcaaggtcaccaagcaggaagtcaaagactttttccggtgggcgtcagatcacgtgaccgaggtgactcacgagttttacgtcagaaagggtggagctagaaagaggcccgcccccaatgacgcagatataagtgagcccaagcgggcctgtccgtcagttgcgcagccatcgacgtcagacgcggaagctccggtggactacgcggacagattggctagaggacaacctctctga

SEQ ID NO: 73 - DNA, 1197 bp, Adeno-associated virus 4
atggagctggtcgggtggctggtggaccgcgggatcacgtcagaaaagcaatggatccaggaggaccaggcgtcctacatctccttcaacgccgcctccaactcgcggtcacaaatcaaggccgcgctggacaatgcctccaaaatcatgagcctgacaaagacggctccggactacctggtgggccagaacccgccggaggacatttccagcaaccgcatctaccgaatcctcgagatgaacgggtacgatccgcagtacgcggcctccgtcttcctgggctgggcgcaaaagaagttcgggaagaggaacaccatctggctctttgggccggccacgacgggtaaaaccaacatcgcggaagccatcgcccacgccgtgcccttctacggctgcgtgaactggaccaatgagaactttccgttcaacgattgcgtcgacaagatggtgatctggtgggaggagggcaagatgacggccaaggtcgtagagagcgccaaggccatcctgggcggaagcaaggtgcgcgtggaccaaaagtgcaagtcatcggcccagatcgacccaactcccgtgatcgtcacctccaacaccaacatgtgcgcggtcatcgacggaaactcgaccaccttcgagcaccaacaaccactccaggaccggatgttcaagttcgagctcaccaagcgcctggagcacgactttggcaaggtcaccaagcaggaagtcaaagactttttccggtgggcgtcagatcacgtgaccgaggtgactcacgagttttacgtcagaaagggtggagctagaaagaggcccgcccccaatgacgcagatataagtgagcccaagcgggcctgtccgtcagttgcgcagccatcgacgtcagacgcggaagctccggtggactacgcggacaggtaccaaaacaaatgttctcgtcacgtgggtatgaatctgatgctttttccctgccggcaatgcgagagaatgaatcagaatgtggacatttgcttcacgcacggggtcatggactgtgccgagtgcttccccgtgtcagaatctcaacccgtgtctgtcgtcagaaagcggacgtatcagaaactgtgtccgattcatcacatcatggggagggcgcccgaggtggcctgctcggcctgcgaactggccaatgtggacttggatgactgtgacatggaacaa

SEQ ID NO: 74 - DNA, 245 bp, Adeno-associated virus 4
ctccatcatctaggtttgcccactgacgtcaatgtgacgtcctagggttagggaggtccctgtattagcagtcacgtgagtgtcgtatttcgcggagcgtagcggagcgcataccaagctgccacgtcacagccacgtggtccgtttgcgacagtttgcgacaccatgtggtcaggagggtatataaccgcgagtgagccagcgaggagctccattttgcccgcgaattttgaacgagcagcagc

SEQ ID NO: 75 - protein, 313 aa, Adeno-associated virus 4
  MOD_RES (313)..(313): Xaa = any amino acid
MELVGWLVDRGITSEKQWIQEDQASYISFNAASNSRSQIKAALDNASKIMSLTKTAPDYLVGQNPPEDISSNRIYRILEMNGYDPQYAASVFLGWAQKKFGKRNTIWLFGPATTGKTNIAEAIAHAVPFYGCVNWTNENFPFNDCVDKMVIWWEEGKMTAKVVESAKAILGGSKVRVDQKCKSSAQIDPTPVIVTSNTNMCAVIDGNSTTFEHQQPLQDRMFKFELTKRLEHDFGKVTKQEVKDFFRWASDHVTEVTHEFYVRKGGARKRPAPNDADISEPKRACPSVAQPSTSDAEAPVDYADRLARGQPLX

SEQ ID NO: 76 - protein, 399 aa, Adeno-associated virus 4
MELVGWLVDRGITSEKQWIQEDQASYISFNAASNSRSQIKAALDNASKIMSLTKTAPDYLVGQNPPEDISSNRIYRILEMNGYDPQYAASVFLGWAQKKFGKRNTIWLFGPATTGKTNIAEAIAHAVPFYGCVNWTNENFPFNDCVDKMVIWWEEGKMTAKVVESAKAILGGSKVRVDQKCKSSAQIDPTPVIVTSNTNMCAVIDGNSTTFEHQQPLQDRMFKFELTKRLEHDFGKVTKQEVKDFFRWASDHVTEVTHEFYVRKGGARKRPAPNDADISEPKRACPSVAQPSTSDAEAPVDYADRYQNKCSRHVGMNLMLFPCRQCERMNQNVDICFTHGVMDCAECFPVSESQPVSVVRKRTYQKLCPIHHIMGRAPEVACSACELANVDLDDCDMEQ

SEQ ID NO: 77 - protein, 623 aa, Adeno-associated virus 4
MPGFYEIVLKVPSDLDEHLPGISDSFVSWVAEKEWELPPDSDMDLNLIEQAPLTVAEKLQREFLVEWRRVSKAPEALFFVQFEKGDSYFHLHILVETVGVKSMVVGRYVSQIKEKLVTRIYRGVEPQLPNWFAVTKTRNGAGGGNKVVDDCYIPNYLLPKTQPELQWAWTNMDQYISACLNLAERKRLVAQHLTHVSQTQEQNKENQNPNSDAPVIRSKTSARYMELVGWLVDRGITSEKQWIQEDQASYISFNAASNSRSQIKAALDNASKIMSLTKTAPDYLVGQNPPEDISSNRIYRILEMNGYDPQYAASVFLGWAQKKFGKRNTIWLFGPATTGKTNIAEAIAHAVPFYGCVNWTNENFPFNDCVDKMVIWWEEGKMTAKVVESAKAILGGSKVRVDQKCKSSAQIDPTPVIVTSNTNMCAVIDGNSTTFEHQQPLQDRMFKFELTKRLEHDFGKVTKQEVKDFFRWASDHVTEVTHEFYVRKGGARKRPAPNDADISEPKRACPSVAQPSTSDAEAPVDYADRYQNKCSRHVGMNLMLFPCRQCERMNQNVDICFTHGVMDCAECFPVSESQPVSVVRKRTYQKLCPIHHIMGRAPEVACSACELANVDLDDCDMEQ

SEQ ID NO: 78 - protein, 537 aa, Adeno-associated virus 4
  MOD_RES (537)..(537): Xaa = any amino acid
MPGFYEIVLKVPSDLDEHLPGISDSFVSWVAEKEWELPPDSDMDLNLIEQAPLTVAEKLQREFLVEWRRVSKAPEALFFVQFEKGDSYFHLHILVETVGVKSMVVGRYVSQIKEKLVTRIYRGVEPQLPNWFAVTKTRNGAGGGNKVVDDCYIPNYLLPKTQPELQWAWTNMDQYISACLNLAERKRLVAQHLTHVSQTQEQNKENQNPNSDAPVIRSKTSARYMELVGWLVDRGITSEKQWIQEDQASYISFNAASNSRSQIKAALDNASKIMSLTKTAPDYLVGQNPPEDISSNRIYRILEMNGYDPQYAASVFLGWAQKKFGKRNTIWLFGPATTGKTNIAEAIAHAVPFYGCVNWTNENFPFNDCVDKMVIWWEEGKMTAKVVESAKAILGGSKVRVDQKCKSSAQIDPTPVIVTSNTNMCAVIDGNSTTFEHQQPLQDRMFKFELTKRLEHDFGKVTKQEVKDFFRWASDHVTEVTHEFYVRKGGARKRPAPNDADISEPKRACPSVAQPSTSDAEAPVDYADRLARGQPLX

SEQ ID NO: 79 - protein, 623 aa, Adeno-associated virus 4; identical to SEQ ID NO: 77

SEQ ID NO: 80 - protein, 544 aa, Adeno-associated virus 4
MSDDSEMRAAAGGAAVEGGQGADGVGNASGDWHCDSTWSEGHVTTTSTRTWVLPTYNNHLYKRLGESLQSNTYNGFSTPWGYFDFNRFHCHFSPRDWQRLINNNWGMRPKAMRVKIFNIQVKEVTTSNGETTVANNLTSTVQIFADSSYELPYVMDAGQEGSLPPFPNDVFMVPQYGYCGLVTGNTSQQQTDRNAFYCLEYFPSQMLRTGNNFEITYSFEKVPFHSMYAHSQSLDRLMNPLIDQYLWGLQSTTTGTTLNAGTATTNFTKLRPTNFSNFKKNWLPGPSIKQQGFSKTANQNYKIPATGSDSLIKYETHSTLDGRWSALTPGPPMATAGPADSKFSNSQLIFAGPKQNGNTATVPGTLIFTSEEELAATNATDTDMWGNLPGGDQSNSNLPTVDRLTALGAVPGMVWQNRDIYYQGPIWAKIPHTDGHFHPSPLIGGFGLKHPPPQIFIKNTPVPANPATTFSSTPVNSFITQYSTGQVSVQIDWEIQKERSKRWNPEVQFTSNYGQQNSLLWAPDAAGKYTEPRAIGTRYLTHHL

SEQ ID NO: 81 - protein, 734 aa, Adeno-associated virus 4
MTDGYLPDWLEDNLSEGVREWWALQPGAPKPKANQQHQDNARGLVLPGYKYLGPGNGLDKGEPVNAADAAALEHDKAYDQQLKAGDNPYLKYNHADAEFQQRLQGDTSFGGNLGRAVFQAKKRVLEPLGLVEQAGETAPGKKRPLIESPQQPDSSTGIGKKGKQPAKKKLVFEDETGAGDGPPEGSTSGAMSDDSEMRAAAGGAAVEGGQGADGVGNASGDWHCDSTWSEGHVTTTSTRTWVLPTYNNHLYKRLGESLQSNTYNGFSTPWGYFDFNRFHCHFSPRDWQRLINNNWGMRPKAMRVKIFNIQVKEVTTSNGETTVANNLTSTVQIFADSSYELPYVMDAGQEGSLPPFPNDVFMVPQYGYCGLVTGNTSQQQTDRNAFYCLEYFPSQMLRTGNNFEITYSFEKVPFHSMYAHSQSLDRLMNPLIDQYLWGLQSTTTGTTLNAGTATTNFTKLRPTNFSNFKKNWLPGPSIKQQGFSKTANQNYKIPATGSDSLIKYETHSTLDGRWSALTPGPPMATAGPADSKFSNSQLIFAGPKQNGNTATVPGTLIFTSEEELAATNATDTDMWGNLPGGDQSNSNLPTVDRLTALGAVPGMVWQNRDIYYQGPIWAKIPHTDGHFHPSPLIGGFGLKHPPPQIFIKNTPVPANPATTFSSTPVNSFITQYSTGQVSVQIDWEIQKERSKRWNPEVQFTSNYGQQNSLLWAPDAAGKYTEPRAIGTRYLTHHL

SEQ ID NO: 82 - protein, 598 aa, Adeno-associated virus 4
TAPGKKRPLIESPQQPDSSTGIGKKGKQPAKKKLVFEDETGAGDGPPEGSTSGAMSDDSEMRAAAGGAAVEGGQGADGVGNASGDWHCDSTWSEGHVTTTSTRTWVLPTYNNHLYKRLGESLQSNTYNGFSTPWGYFDFNRFHCHFSPRDWQRLINNNWGMRPKAMRVKIFNIQVKEVTTSNGETTVANNLTSTVQIFADSSYELPYVMDAGQEGSLPPFPNDVFMVPQYGYCGLVTGNTSQQQTDRNAFYCLEYFPSQMLRTGNNFEITYSFEKVPFHSMYAHSQSLDRLMNPLIDQYLWGLQSTTTGTTLNAGTATTNFTKLRPTNFSNFKKNWLPGPSIKQQGFSKTANQNYKIPATGSDSLIKYETHSTLDGRWSALTPGPPMATAGPADSKFSNSQLIFAGPKQNGNTATVPGTLIFTSEEELAATNATDTDMWGNLPGGDQSNSNLPTVDRLTALGAVPGMVWQNRDIYYQGPIWAKIPHTDGHFHPSPLIGGFGLKHPPPQIFIKNTPVPANPATTFSSTPVNSFITQYSTGQVSVQIDWEIQKERSKRWNPEVQFTSNYGQQNSLLWAPDAAGKYTEPRAIGTRYLTHHL

SEQ ID NO: 83 - DNA, 129 bp, Adeno-associated virus 4
ttggccactccctctatgcgcgctcgctcactcactcggccctgcggccagaggccggcagtctggagacctttggtgtccagggcagggccgagtgagtgagcgagcgcgcatagagggagtggccaa

SEQ ID NO: 84 - DNA, 125 bp, Adeno-associated virus 4
ttggccactccctctatgcgcgctcgctcactcactcggccctggagaccaaaggtctccagactgccggcctctggccggcagggccgagtgagtgagcgagcgcgcatagagggagtggccaa

SEQ ID NO: 85 - DNA, 4768 bp, Adeno-associated virus 4
  modified_base (3009)..(3009): n is a, c, t or g
  misc_feature (3009)..(3009): n is a, c, g, or t
ttggccactccctctatgcgcgctcgctcactcactcggccctggagaccaaaggtctccagactgccggcctctggccggcagggccgagtgagtgagcgagcgcgcatagagggagtggccaactccatcatctaggtttgcccactgacgtcaatgtgacgtcctagggttagggaggtccctgtattagcagtcacgtgagtgtcgtatttcgcggagcgtagcggagcgcataccaagctgccacgtcacagccacgtggtccgtttgcgacagtttgcgacaccatgtggtcaggagggtatataaccgcgagtgagccagcgaggagctccattttgcccgcgaattttgaacgagcagcagccatgccggggttctacgagatcgtgctgaaggtgcccagcgacctggacgagcacctgcccggcatttctgactcttttgtgagctgggtggccgagaaggaatgggagctgccgccggattctgacatggacttgaatctgattgagcaggcacccctgaccgtggccgaaaagctgcaacgcgagttcctggtcgagtggcgccgcgtgagtaaggccccggaggccctcttctttgtccagttcgagaagggggacagctacttccacctgcacatcctggtggagaccgtgggcgtcaaatccatggtggtgggccgctacgtgagccagattaaagagaagctggtgacccgcatctaccgcggggtcgagccgcagcttccgaactggttcgcggtgaccaagacgcgtaatggcgccggaggcgggaacaaggtggtggacgactgctacatccccaactacctgctccccaagacccagcccgagctccagtgggcgtggactaacatggaccagtatataagcgcctgtttgaatctcgcggagcgtaaacggctggtggcgcagcatctgacgcacgtgtcgcagacgcaggagcagaacaaggaaaaccagaaccccaattctgacgcgccggtcatcaggtcaaaaacctccgccaggtacatggagctggtcgggtggctggtggaccgcgggatcacgtcagaaaagcaatggatccaggaggaccaggcgtcctacatctccttcaacgccgcctccaactcgcggtcacaaatcaaggccgcgctggacaatgcctccaaaatcatgagcctgacaaagacggctccggactacctggtgggccagaacccgccggaggacatttccagcaaccgcatctaccgaatcctcgagatgaacgggtacgatccgcagtacgcggcctccgtcttcctgggctgggcgcaaaagaagttcgggaagaggaacaccatctggctctttgggccggccacgacgggtaaaaccaacatcgcggaagccatcgcccacgccgtgcccttctacggctgcgtgaactggaccaatgagaactttccgttcaacgattgcgtcgacaagatggtgatctggtgggaggagggcaagatgacggccaaggtcgtagagagcgccaaggccatcctgggcggaagcaaggtgcgcgtggaccaaaagtgcaagtcatcggcccagatcgacccaactcccgtgatcgtcacctccaacaccaacatgtgcgcggtcatcgacggaaactcgaccaccttcgagcaccaacaaccactccaggaccggatgttcaagttcgagctcaccaagcgcctggagcacgactttggcaaggtcaccaagcaggaagtcaaagactttttccggtgggcgtcagatcacgtgaccgaggtgactcacgagttttacgtcagaaagggtggagctagaaagaggcccgcccccaatgacgcagatataagtgagcccaagcgggcctgtccgtcagttgcgcagccatcgacgtcagacgcggaagctccggtggactacgcggacaggtaccaaaacaaatgttctcgtcacgtgggtatgaatctgatgctttttccctgccggcaatgcgagagaatgaatcagaatgtggacatttgcttcacgcacggggtcatggactgtgccgagtgcttccccgtgtcagaatctcaacccgtgtctgtcgtcagaaagcggacgtatcagaaactgtgtccgattcatcacatcatggggagggcgcccgaggtggcctgctcggcctgcgaactggccaatgtggacttggatgactgtgacatggaacaataaatgactcaaaccagatatgactgacggttaccttccagattggctagaggacaacctctctgaaggcgttcgagagtggtgggcgctgcaacctggagcccctaaacccaaggcaaatcaacaacatcaggacaacgctcggggtcttgtgcttccgggttacaaatacctcggacccggcaacggactcgacaagggggaacccgtcaacgcagcggacgcggcagccctcgagcacgacaaggcctacgaccagcagctcaaggccggtgacaacccctacctcaagtacaaccacgccgacgcggagttccagcagcggcttcagggcgacacaccgtttgggggcaacctcggcagagcagtcttccaggccaaaaagagggttcttgaacctcttggtctggttgagcaagcgggtgagacggctcctggaaagaagagaccgttgattgaatccccccagcagcccgactcctccacgggtatcggcaaaaaaggcaagcagccggctaaaaagaagctcgttttcgaagacgaaactggagcaggcgacggaccccctgagggatcaacttccggagccatgtctgatgacagtgagatgcgtgcagcagctggcggagctgcagtcgagggsggacaaggtgccgatggagtgggtaatgcctcgggtgattggcattgcgattccacctggtctgagggccacgtcacgaccaccagcaccagaacctgggtcttgcccacctacaacaaccacctntacaagcgactcggagagagcctgcagtccaacacctacaacggattctccaccccctggggatactttgacttcaaccgcttccactgccacttctcaccacgtgactggcagcgactcatcaacaacaactggggcatgcgacccaaagccatgcgggtcaaaatcttcaacatccaggtcaaggaggtcacgacgtcgaacggcgagacaacggtggctaataaccttaccagcacggttcagatctttgcggactcgtcgtacgaactgccgtacgtgatggatgcgggtcaagagggcagcctgcctccttttcccaacgacgtctttatggtgccccagtacggctactgtggactggtgaccggcaacacttcgcagcaacagactgacagaaatgccttctactgcctggagtactttccttcgcagatgctgcggactggcaacaactttgaaattacgtacagttttgagaaggtgcctttccactcgatgtacgcgcacagccagagcctggaccggctgatgaaccctctcatcgaccagtacctgtggggactgcaatcgaccaccaccggaaccaccctgaatgccgggactgccaccaccaactttaccaagctgcggcctaccaacttttccaactttaaaaagaactggctgcccgggccttcaatcaagcagcagggcttctcaaagactgccaatcaaaactacaagatccctgccaccgggtcagacagtctcatcaaatacgagacgcacagcactctggacggaagatggagtgccctgacccccggacctccaatggccacggctggacctgcggacagcaagttcagcaacagccagctcatctttgcggggcctaaacagaacggcaacacggccaccgtacccgggactctgatcttcacctctgaggaggagctggcagccaccaacgccaccgatacggacatgtggggcaacctacctggcggtgaccagagcaacagcaacctgccgaccgtggacagactgacagccttgggagccgtgcctggaatggtctggcaaaacagagacatttactaccagggtcccatttgggccaagattcctcataccgatggacactttcacccctcaccgctgattggtgggtttgggctgaaacacccgcctcctcaaatttttatcaagaacaccccggtacctgcgaatcctgcaacgaccttcagctctactccggtaaactccttcattactcagtacagcactggccaggtgtcggtgcagattgactgggagatccagaaggagcggtccaaacgctggaaccccgaggtccagtttacctccaactacggacagcaaaactctctgttgtgggctcccgatgcggctgggaaatacactgagcctagggctatcggtacccgctacctcacccaccacctgtaataacctgttaatcaataaaccggtttattcgtttcagttgaactttggtctccgtgtccttcttatcttatctcgtttccatggctactgcgtacataagcagcggcctgcggcgcttgcgcttcgcggtttacaactgccggttaatcagtaacttctggcaaaccatgatgatggagttggccactccctctatgcgcgctcgctcactcactcggccctggagaccaaaggtctccagactgccggcctctggccggcagggccgagtgagtgagcgagcgcgcatagagggagtggccaa

SEQ ID NO: 86 - protein, 3098 aa, Adeno-associated virus
GAATTCGCCCTTTCTACGGCTGCGTCAACTGGACCAATGAGAACTTTCCCTTCAACGATTGCGTCGACAAGATGGTGATCTGGTGGGAGGAGGGCAAGATGACGGCCAAGGTCGTGGAGTCCGCCAAGGCCATTCTCGGCGGCAGCAAGGTGCGCGTGGACCAAAAGTGCAAGTCTTCCGCCCAGATCGATCCCACCCCCGTGATCGTCACTTCCAACACCAACATGTGCGCTGTGATTGACGGGAACAGCACCACCTTCGAGCACCAGCAGCCGTTACAAGACCGGATGTTCAAATTTGAACTCACCCGCCGTCTGGAGCACGACTTTGGCAAGGTGACAAAGCAGGAAGTCAAAGAGTTCTTCCGCTGGGCGCAGGATCACGTGACCGAGGTGGCGCATGAGTTCTACGTCAGAAAGGGTGGAGCCAACAAGAGACCCGCCCCCGATGACGCGGATAAAAGCGAGCCCAAGCGGGCCTGCCCCTCAGTCGCGGATCCATCGACGTCAGACGCGGAAGGAGCTCCGGTGGACTTTGCCGACAGGTACCAAAACAAATGTTCTCGTCACGCGGGCATGCTTCAGATGCTGTTTCCCTGCAAGACATGCGAGAGAATGAATCAGAATTTCAACATTTGCTTCACGCACGGGACCAGAGACTGTTCAGAATGTTTCCCCGGCGTGTCAGAATCTCAACCGGTCGTCAGAAAGAGGACGTATCGGAAACTCTGTGCCATTCATCATCTGCTGGGGCGGGCTCCCGAGATTGCTTGCTCGGCCTGCGATCTGGTCAACGTGGACCTGGATGACCGTGTTTCTGAGCAATAAATGACTTAAACCAGGTATGGCTGCCGATGGTTATCTTCCAGATTGGCTCGAGGACAACCTCTCTGAGGGCATTCGCGAGTGGTGGGACTTGAAACCTGGAGCCCCGAAACCCAAAGCCAACCAGCAAAAGCAGGACGACGGCCGGGGTCTGGTGCTTCCTGGCTACAAGTACCTCGGACCCTTCAACGGACTCGACAAGGGAGAGCCGGTCAACGAGGCAGACGCCGCGGCCCTCGAGCACGACAAGGCCTACGACAAGCAGCTCGAGCAGGGGGACAACCCGTACCTCAAGTACAACCACGCCGACGCCGAGTTTCAGGAGCGTCTTCAAGAAGATACGTCTTTTGGGGGCAACCTCGGGCGAGCAGTCTTCCAGGCCAAGAAGCGGGTTCTCGAACCTCTCGGTCTGGTTGAGGAAGGCGCTAAGACGGCTCCTGGAAAGAAGAGACCCATAGAATCCCCCGACTCCTCCACGGGCATCGGCAAGAAAGGCCAGCAGCCCGCTAAAAAGAAGCTCAACTTTGGGCAGACTGGCGACTCAGAGTCAGTGCCCGACCCCCAACCTCTCGGAGAACCTCCCGCCGCGCCCTCAGGTCTGGGATCTGGTACAATGGCTGCAGGCGGTGGCGCACCAATGGCAGACAATAACGAAGGCGCCGACGGAGTGGGTAATGCCTCCGGAAATTGGCATTGCGATTCCACATGGCTGGGCGACAGAGTCATCACCACCAGCACCCGCACCTGGGCCCTGCCCACCTACAACAACCACCTCTACAAGCAGATATCAAGTCAGAGCGGGGCTACCAACGACAACCACTTCTTCGGCTACAGCACCCCCTGGGGCTATTTTGACTTCAACAGATTCCACTGCCACTTCTCACCACGTGACTGGCAGCGACTCATCAACAACAACTGGGGATTCCGGCCCAGAAAGCTGCGGTTCAAGTTGTTCAACATCCAGGTCAAGGAGGTCACGACGAACGACGGCGTTACGACCATCGCTAATAACCTTACCAGCACGATTCAGGTCTTCTCGGACTCGGAGTACCAACTGCCGTACGTCCTCGGCTCTGCGCACCAGGGCTGCCTCCCTCCGTTCCCTGCGGACGTGTTCATGATTCCTCAGTACGGATATCTGACTCTAAACAACGGCAGTCAGTCTGTGGGACGTTCCTCCTTCTACTGCCTGGAGTACTTTCCTTCTCAGATGCTGAGAACGGGCAATAACTTTGAATTCAGCTACACCTTTGAGGAAGTGCCTTTCCACAGCAGCTATGCGCACAGCCAGAGCCTGGACCGGCTGATGAATCCCCTCATCGACCAGTACCTGTACTACCTGGCCCGGACCCAGAGCACTACGGGGTCCACAAGGGAGCTGCAGTTCCATCAGGCTGGGCCCAACACCATGGCCGAGCAATCAAAGAACTGGCTGCCCGGACCCTGTTATCGGCAGCAGAGACTGTCAAAAAACATAGACAGCAACAACAACAGTAACTTTGCCTGGACCGGGGCCACTAAATACCATCTGAATGGTAGAAATTCATTAACCAACCCGGGCGTAGCCATGGCCACCAACAAGGACGACGAGGACCAGTTCTTTCCCATCAACGGAGTGCTGGTTTTTGGCGAAACGGGGGCTGCCAACAAGACAACGCTGGAAAACGTGCTAATGACCAGCGAGGAGGAGATCAAAACCACCAATCCCGTGGCTACAGAAGAATACGGTGTGGTCTCCAGCAACCTGCAATCGTCTACGGCCGGACCCCAGACACAGACTGTCAACAGCCAGGGGGCTCTGCCCGGCATGGTCTGGCAGAACCGGGACGTGTACCTGCAGGGTCCCATCTGGGCCAAAATTCCTCACACGGACGGCAACTTTCACCCGTCTCCCCTGATGGGCGGATTTGGACTCAAACACCCGCCTCCTCAAATTCTCATCAAAAACACCCCGGTACCTGCTAATCCTCCAGAGGTGTTTACTCCTGCCAAGTTTGCCTCATTTATCACGCAGTACAGCACCGGCCAGGTCAGCGTGGAGATCGAGTGGGAACTGCAGAAAGAAAACAGCAAACGCTGGAATCCAGAGATTCAGTACACCTCAAATTATGCCAAGTCTAATAATGTGGAATTTGCTGTCAACAACGAAGGGGTTTATACTGAGCCTCGCCCCATTGGCACCCGTTACCTCACCCGTAACCTGTAATTGCCTGTTAATCAATAAACCGGTTAATTCGTTTCAGTTGAACTTTGGTCTCTGCGAAGGGCGAATTC

SEQ ID NO: 87 - protein, 728 aa, Adeno-associated virus
MAADGYLPDWLEDNLSEGIREWWDLKPGAPKPKANQQKQDDGRGLVLPGYKYLGPFNGLDKGEPVNEADAAALEHDKAYDKQLEQGDNPYLKYNHADAEFQERLQEDTSFGGNLGRAVFQAKKRVLEPLGLVEEGAKTAPGKKRPIESPDSSTGIGKKGQQPAKKKLNFGQTGDSESVPDPQPLGEPPAAPSGLGSGTMAAGGGAPMADNNEGADGVGNASGNWHCDSTWLGDRVITTSTRTWALPTYNNHLYKQISSQSGATNDNHFFGYSTPWGYFDFNRFHCHFSPRDWQRLINNNWGFRPRKLRFKLFNIQVKEVTTNDGVTTIANNLTSTIQVFSDSEYQLPYVLGSAHQGCLPPFPADVFMIPQYGYLTLNNGSQSVGRSSFYCLEYFPSQMLRTGNNFEFSYTFEEVPFHSSYAHSQSLDRLMNPLIDQYLYYLARTQSTTGSTRELQFHQAGPNTMAEQSKNWLPGPCYRQQRLSKNIDSNNNSNFAWTGATKYHLNGRNSLTNPGVAMATNKDDEDQFFPINGVLVFGETGAANKTTLENVLMTSEEEIKTTNPVATEEYGVVSSNLQSSTAGPQTQTVNSQGALPGMVWQNRDVYLQGPIWAKIPHTDGNFHPSPLMGGFGLKHPPPQILIKNTPVPANPPEVFTPAKFASFITQYSTGQVSVEIEWELQKENSKRWNPEIQYTSNYAKSNNVEFAVNNEGVYTEPRPIGTRYLTRNL

SEQ ID NO: 88 - DNA, 2495 bp, Adeno-associated virus
gaattcgccctttctacggctgcgtcaactagaccaatgagaactttcccttcaacgattgcgtcgacaagatggtgatctggtgggaggagggcaagatgacggccaaggtcgtggagtccgccaaggccattcatcatctgctggggcgggctcccgagattgcttgctcggcctgcgatctggtcaacgtggacctggatgactgtgtttctgagcaataaatgacttaaaccaggtatggctgccgatggttatcttccagattggctcgaggacaacctctctgagggcattcgcgagtggtgggacttgaaacctggagccccgaaacccaaagccaaccagcaaaagcaggacgacggccggggtctggtgcttcctggctacaagtacctcggacccttcaacggactcgacaagggagagccggtcaacgaggcagacgccgcggccctcgagcacgacaaggcctacgacaagcagctcgagcagggggacaacccgtacctcaagtacaaccacgccgacgccgagtttcaggagcgtcttcaagaagatacgtcttttgggggcaacctcgggcgagcagtcttccaggccaagaagcgggttctcgaacctctcggtctggttgaggaaggcgctaagacggctcctggaaagaagagacccatagaatcccccgactcctccacgggcatcggcaagaaaggccagcagcccgctaaaaagaagctcaactttgggcagactggcgactcagagtcagtgcccgaccctcaaccaatcggagaaccccccgcaggcccctctggtctgggatctggtacaatggctgcaggcggtggcgctccaatggcagacaataacgaaggcgccgacggagtgggtaatgcctccggaaattggcattgcgattccacatggctgggcgacagagtcatcaccaccagcacccgcacctgggccctgcccacctacaacaaccacctctacaagcagatatcaagtcagagcggggctaccaacgacaaccacttcttcggctacagcaccccctggggctattttgacttcaacagattccactgccacttctcaccacgtgactggcagcgactcatcaacaacaactggggattccggcccagaaagctgcggttcaagttgttcaacatccaggtcaaggaggtcacgacgaacgacggcgttacgaccatcgctaataaccttaccagcacgattcaggtcttctcggactcggagtaccaactgccgtacgtcctcggctctgcgcaccagggctgcctccctccgttccctgcggacgtgttcatgattcctcagtacggatatctgactctaaacaacggcagtcagtctgtgggacgttcctccttctactgcctggagtactttccttctcagatgctgagaacgggcaataactttgaattcagctacacctttgaggaagtgcctttccacagcagctatgcgcacagccagagcctggaccggctgatgaatcccctcatcgaccagtacctgtactacctggcccggacccagagcactacggggtccacaagggagctgcagttccatcaggctgggcccaacaccatggccgagcaatcaaagaactggctgcccggaccctgttatcggcagcagagactgtcaaaaaacatagacagcaacaacaccagtaactttgcctggaccggggccactaaataccatctgaatggtagaaattcattaaccaacccgggcgtagccatggccaccaacaaggacgacgaggaccagttctttcccatcaacggagtgctggtttttggcaaaacgggggctgccaacaagacaacgctggaaaacgtgctaatgaccagcgaggaggagatcaaaaccaccaatcccgtggctacagaacagtacggtgtggtctccagcaacctgcaatcgtctacggccggaccccagacacagactgtcaacagccagggggctctgcccggcatggtctggcagaaccgggacgtgtacctgcagggtcccatctgggccaaaattcctcacacggacggcaactttcacccgtctcccctgatgggcggatttggactcaaacacccgcctcctcaaattctcatcaaaaacaccccggtacctgctaatcctccagaggtgtttactcctgccaagtttgcctcatttatcacgcagtacagcaccggccaggtcagcgtggagatcgagtgggaactgcagaaagaaaacagcaaacgctggaatccagagattcagtacacctcaaattatgccaagtctaataatgtggaatttgctgtcaacaacgaaggggtttatactgagcctcgccccattggcacccgttacctcacccgtaacctgtaattgcctgttaatcaataaaccggttaattcgtttcagttgaactttggtctctgcgaagggcgaattc

SEQ ID NO: 89 - protein, 728 aa, Adeno-associated virus
MAADGYLPDWLEDNLSEGIREWWDLKPGAPKPKANQQKQDDGRGLVLPGYKYLGPFNGLDKGEPVNEADAAALEHDKAYDKQLEQGDNPYLKYNHADAEFQERLQEDTSFGGNLGRAVFQAKKRVLEPLGLVEEGAKTAPGKKRPIESPDSSTGIGKKGQQPAKKKLNFGQTGDSESVPDPQPIGEPPAGPSGLGSGTMAAGGGAPMADNNEGADGVGNASGNWHCDSTWLGDRVITTSTRTWALPTYNNHLYKQISSQSGATNDNHFFGYSTPWGYFDFNRFHCHFSPRDWQRLINNNWGFRPRKLRFKLFNIQVKEVTTNDGVTTIANNLTSTIQVFSDSEYQLPYVLGSAHQGCLPPFPADVFMIPQYGYLTLNNGSQSVGRSSFYCLEYFPSQMLRTGNNFEFSYTFEEVPFHSSYAHSQSLDRLMNPLIDQYLYYLARTQSTTGSTRELQFHQAGPNTMAEQSKNWLPGPCYRQQRLSKNIDSNNTSNFAWTGATKYHLNGRNSLTNPGVAMATNKDDEDQFFPINGVLVFGKTGAANKTTLENVLMTSEEEIKTTNPVATEQYGVVSSNLQSSTAGPQTQTVNSQGALPGMVWQNRDVYLQGPIWAKIPHTDGNFHPSPLMGGFGLKHPPPQILIKNTPVPANPPEVFTPAKFASFITQYSTGQVSVEIEWELQKENSKRWNPEIQYTSNYAKSNNVEFAVNNEGVYTEPRPIGTRYLTRNL

SEQ ID NO: 90 - DNA, 2504 bp, Adeno-associated virus
gaattcgccctttctacggctgcgtcaactggaccaatgagaactttcccttcaacgattgcgtcgacaagatggtgatctggtgggaggagggcaagatgacggccaaggtcgtggagtccgccaaggccattcatcatctgctggggcgggctcccgagattgcttgctcggcctgcgatctggtcaacgtggacctggatgactgtgtttctgagcaataaatgacttaaaccaggtatggctgccgatggttatcttccagattggctcgaggacaacctctctgagggcattcgcgagtggtgggacttgaaacctggagccccgaaacccaaagccaaccagcaaaagcaggacgacggccggggtctggtgcttcctggctacaagtacctcggacccttcaacggactcgacaagggagagccggtcaacgaggcagacgccgcggccctcgagcacgacaaggcctacgacaagcagctcgagcagggggacaacccgtacctcaagtacaaccacgccgacgccgagtttcaggagcgtcttcaagaagatacgtcttttgggggcaacctcgggcgagcagtcttccaggccaagaagcgggttctcgaacctctcggtctggttgaggaaggcgctaagacggctcctggaaagaagagacccatagaatcccccgactcctccacgggcatcggcaagaaaggccagcagcccgctaaaaagaagctcaactttgggcagactggcgactcagagtcagtgcccgaccctcaaccaatcggagaaccccccgcaggcccctctggtctgggatctggtacaatggctgcaggcggtggcgctccaatggcagacaataacgaaggcgccgacggagtgggtaatgcctccggaaattggcattgcgattccacatggctgggcgacagagtcatcaccaccagcacccgcacctgggccctgcccacctacaacaaccacctctacaagcagatatcaagtcagagcggggctaccaacgacaaccacttcttcggctacagcaccccctggggctattttgacttcaacagattccactgccacttctcatcacgtgactggcagcgactcatcaacaacaactggggattccggcccaagagactcaacttcaagctcttcaacatccaggtcaaggaggtcacgcagaatgaaggcaccaagaccatcgccaataaccttaccagcacgattcaggtctttacggactcggaataccggctcccgtacgtcctcggctctgcgcaccagggctgcctgcctccgttcccggcggacgtcttcatgattcctcagtacgggtacctgactctgaacaacggcagtcaggccgtgggccgttcctccttctactgcctggagtactttccttctcaaatgctgagaacgggcaacaactttgagttcagctaccagtttgaggacgtgccttttcacagcagctacgcgcacagccaaagcctggaccggctgatgaaccccctcatcgaccagtacctgtactacctgtctcggactcagtccacgggaggtaccgcaggaactcagcagttgctattttctcaggccgggcctaataacatgtcggctcaggccaaaaactggctacccgggccctgctaccggcagcaacgcgtctccacgacactgtcgcaaaataacaacagcaactttgcttggaccggtgccaccaagtatcatctgaatggcagagactctctggtaaatcccggtgtcgctatggcaacgcacaaggacgacgaagagcgattttttccatccagcggagtcttgatgtttgggaaacagggagctggaaaagacaacgtggactatagcagcgttatgctaaccagtgaggaagaaatcaaaaccaccaacccagtggccacagaacagtacggcgtggtggccgataacctgcaacagcaaaacgccgctcctattgtaggggccgtcaacagtcaaggagccttacctggcatggtctggcagaaccgggacgtgtacctgcagggtcctatctgggccaagattcctcacacggacggcaactttcatccttcgccgctgatgggaggctttggactgaaacacccgcctcctcagatcctgattaagaatacacctgttcccgcggatcctccaactaccttcagtcaagccaagccggcgtcgttcatcacgcagtacagcaccggacaggtcagcgtggaaattgaatgggagctgcagaaagagaacagcaagcgctggaacccagagattcagtatacttccaactactacaaatctacaaatgtggactttgctgtcaatactgagggtacttattcagagcctcgccccattggcacccgttacctcacccgtaacctgtaattgcctgttaatcaataaaccggttaattcgtttcagttgaactttggtctctgcgaagggcgaattc

SEQ ID NO: 91 - protein, 731 aa, Adeno-associated virus
MAADGYLPDWLEDNLSEGIREWWDLKPGAPKPKANQQKQDDGRGLVLPGYKYLGPFNGLDKGEPVNEADAAALEHDKAYDKQLEQGDNPYLKYNHADAEFQERLQEDTSFGGNLGRAVFQAKKRVLEPLGLVEEGAKTAPGKKRPIESPDSSTGIGKKGQQPAKKKLNFGQTGDSESVPDPQPIGEPPAGPSGLGSGTMAAGGGAPMADNNEGADGVGNASGNWHCDSTWLGDRVITTSTRTWALPTYNNHLYKQISSQSGATNDNHFFGYSTPWGYFDFNRFHCHFSSRDWQRLINNNWGFRPKRLNFKLFNIQVKEVTQNEGTKTIANNLTSTIQVFTDSEYRLPYVLGSAHQGCLPPFPADVFMIPQYGYLTLNNGSQAVGRSSFYCLEYFPSQMLRTGNNFEFSYQFEDVPFHSSYAHSQSLDRLMNPLIDQYLYYLSRTQSTGGTAGTQQLLFSQAGPNNMSAQAKNWLPGPCYRQQRVSTTLSQNNNSNFAWTGATKYHLNGRDSLVNPGVAMATHKDDEERFFPSSGVLMFGKQGAGKDNVDYSSVMLTSEEEIKTTNPVATEQYGVVADNLQQQNAAPIVGAVNSQGALPGMVWQNRDVYLQGPIWAKIPHTDGNFHPSPLMGGFGLKHPPPQILIKNTPVPADPPTTFSQAKPASFITQYSTGQVSVEIEWELQKENSKRWNPEIQYTSNYYKSTNVDFAVNTEGTYSEPRPIGTRYLTRNL

SEQ ID NO: 92 - DNA, 3128 bp, Adeno-associated virus
gaattcgccctttctacggctgcgtcaactggaccaatgagaactttcccttcaacgattgcgtcgacaagatggtgatctggtgggaggagggcaagatgacggccaaggtcgtggagtccgccaaggccattctcggcggcagcaaggtgcgcgtggaccaaaagtgcaagtcttccgcccagatcgatcccacccccgtgatcgtcacttccaacaccaacatgtgcgccgtgattgacgggaacagcaccaccttcgagcaccagcagccgttacaagaccggatgttcaaatttgaactcacccgccgtctggagcacgactttggcaaggtgacaaagcaggaagtcaaagagttcttccgctgggcgcaggatcacgtgaccgaggtggcgcatgagttctacgtcagaaagggtggagccaacaagagacccgcccccgatgacgcggataaaagcgagcccaagcgggcctgcccctcagtcgcggatccatcgacgtcagacgcggaaggagctccggtggactttgccgacaggtaccaaaacaaatgttctcgtcacgcgggcatgcttcagatgctgtttccctgcaagacatgcgagagaatgaatcagaatttcaacatttgcttcacgcacgggaccagagactgttcagaatgtttccccggcgtgtcagaatctcaaccggtcgtcagaaagaggacgtatcggaaactctgtgccattcatcatctgctagggcgggctcccgagattgcttgctcggcctgcgatctggtcaacgtggacctggatgactgtgtttctgagcaataaatgacttaaaccaggtatggctgccgatggttatcttccagattggctcgaggacaacctctctgagggcattcgcgagtggtgggacttgaaacctggagccccgaaacccaaagccaaccagcaaaagcaggacgacggccggggtctggtgcttcctggctacaagtacctcggacccttcaacggactcgacaagggggagcccgtcaacgcggcggacgcagcggccctcgagcacgacaaggcctacgaccagcagctcaaagcgggtgacaatccgtacctgcggtataaccacgccgacgccgagtttcaggagcgtctgcaagaagatacgtcttttgggggcaacctcgggcgagcagtcttccaggccaagaagcgggttctcgaacctctcggtctggttgaggaaggcgctaagacggctcctggaaagaagagaccggtagagccatcaccccagcgttctccagactcctctacgggcatcggcaagacaggccagcagcccgcgaaaaagagactcaactttgggcagactggcgactcagagtcagtgcccgaccctcaaccaatcggagaaccccccgcaggcccctctggtctgggatctggtacaatggctgcaggcggtggcgctccaatggcagacaataacgaaggcgccgacggagtgggtagttcctcaggaaattggcattgcgattccacatggctgggcgacagagtcatcaccaccagcacccgaacctgggccctccccacctacaacaaccacctctacaagcaaatctccaacgggacatcgggaggaagcaccaacgacaacacctacttcggctacagcaccccctgggggtattttgactttaacagattccactgccacttctcaccacgtgactggcagcgactcatcaacaacaactggggattccggcccaagagactcaacttcaagctcttcaacatccaggtcaaggaggtcacgcagaatgaaggcaccaagaccatcgccaataaccttaccagcacgattcaggtctttacggactcggaataccagctcccgtacgtcctcggctctgcgcaccagggctgcctgcctccgttcccggcggacgtcttcatgattcctcagtacgggtacctgactctgaacaacggcagtcaggccgtgggccgttcctccttctactgcctggagtactttccttctcaaatgctgagaacgggcaacaactttgagttcagctaccagtttgaggacgtgccttttcacagcagctacgcgcacagccaaagcctggaccggctgatgaaccccctcatcgaccagtacctgtactacctgtctcggactcagtccacgggaggtaccgcaggaactcagcagttgctattttctcaggccgggcctaataacatgtcggctcaggccaaaaactggctacccgggccctgctaccggcagcaacgcgtctccacgacactgtcgcaaaataacaacagcaactttgcttggaccggtgccaccaagtatcatctgaatggcagagactctctggtaaatcccggtgtcgctatggcaacgcacaaggacgacgaagagcgattttttccatccagcggagtcttgatgtttgggaaacagggagctggaaaagacaacgtggactatagcagcgttatgctaaccagtgaggaagaaatcaaaaccaccaacccagtggccacagaacagtacggcgtggtggccgataacctgcaacagcaaaacgccgctcctattgtaggggccgtcaacagtcaaggagccttacctggcatggtctggcagaaccgggacgtgtacctgcagggtcctatctgggccaagattcctcacacggacggcaactttcatccttcgccgctgatgggaggctttggactgaaacacccgcctcctcagatcctgattaagaatacacctgttcccgcggatcctccaactaccttcagtcaagccaagctggcgtcgttcatcacgcagtacagcaccggacaggtcagcgtggaaattgaatgggagctgcagaaagagaacagcaagcgctggaacccagagattcagtatacttccaactactacaaatctacaaatgtggactttgctgtcaatactgagggtacttattcagagcctcgccccattggcacccgttacctcacccgtaacctgtaattgcctgttaatcaataaaccggctaattcgtttcagttgaactttggtctctgcgaagggcgaattc

SEQ ID NO: 93 - protein, 738 aa, Adeno-associated virus
MAADGYLPDWLEDNLSEGIREWWDLKPGAPKPKANQQKQDDGRGLVLPGYKYLGPFNGLDKGEPVNAADAAALEHDKAYDQQLKAGDNPYLRYNHADAEFQERLQEDTSFGGNLGRAVFQAKKRVLEPLGLVEEGAKTAPGKKRPVEPSPQRSPDSSTGIGKTGQQPAKKRLNFGQTGDSESVPDPQPIGEPPAGPSGLGSGTMAAGGGAPMADNNEGADGVGSSSGNWHCDSTWLGDRVITTSTRTWALPTYNNHLYKQISNGTSGGSTNDNTYFGYSTPWGYFDFNRFHCHFSPRDWQRLINNNWGFRPKRLNFKLFNIQVKEVTQNEGTKTIANNLTSTIQVFTDSEYQLPYVLGSAHQGCLPPFPADVFMIPQYGYLTLNNGSQAVGRSSFYCLEYFPSQMLRTGNNFEFSYQFEDVPFHSSYAHSQSLDRLMNPLIDQYLYYLSRTQSTGGTAGTQQLLFSQAGPNNMSAQAKNWLPGPCYRQQRVSTTLSQNNNSNFAWTGATKYHLNGRDSLVNPGVAMATHKDDEERFFPSSGVLMFGKQGAGKDNVDYSSVMLTSEEEIKTTNPVATEQYGVVADNLQQQNAAPIVGAVNSQGALPGMVWQNRDVYLQGPIWAKIPHTDGNFHPSPLMGGFGLKHPPPQILIKNTPVPADPPTTFSQAKLASFITQYSTGQVSVEIEWELQKENSKRWNPEIQYTSNYYKSTNVDFAVNTEGTYSEPRPIGTRYLTRNL

SEQ ID NO: 94 - DNA, 3084 bp, Adeno-associated virus
gaattcgccctttctacggctgcatcaactggaccaatgagaactttcccttcaacgattgcgtcgacaagatggtgatctggtgggaggagggcaagatgacggccaaggtcgtggagtccgccaaggccattctcggcggcagcaaggtgcgcgtggaccaaaagtgcaagtcgtccgcccagatcgaccccacccccgtgatcgtcacctccaacaccaacatgtgcgccgtgattgacgggaacagcaccaccttcgagcaccagcagccgttgcaggaccggatgttcaagttcgaactcacccgccgtctggagcacgactttggcaaggtgaccaagcaggaagtcaaagagttcttccgctgggcgcaggatcacgtgaccgaggtggcgcatgagttctacgtcagaaagggcggagccagcaaaagacccgcccccgatgacgcggatataagcgagcccaagcgggcctgcccctcagtcgcggatccatcgacgtcagacgcggaaggagctccggtggactttgccgacaggtaccaaaacaaatgttctcgtcacgcgggcatgcttcagatgctgtttccctgcaaaacgtgcgagaaaatgaatcagaatttcaacatttgcttcacgcacggggtcagagactgctcagaatgtttccccggtgcatcagaatctcaaccggtcgtcagaaaaaaaacgtatcagaaactgtgtgccattcatcatctgctggggcgggcacccgagattgcttgctcggcctgcgatctggtcaacgtggacctggacgactgtgtttctgagcaataaatgacttaaaccaggtatggctgccgatggttatcttccagattggcttgaggacaacctctctgagggcattcgcgagtggtgggacctgaaacctggagccccgaaacccaaagccaaccagcaaaagcaggacgacggccggggtctggtgcttcctggctacaagtacctcggacccttcaacggactcgacaagggggagcccgtcaacgcggcggacgcagcggccctcgagcacgacaaggcctacgaccagcagctcaaagcgggtgacaatccgtacctgcggtataaccacgccgacgccgagtttcaggagcgtctgcaagaagatacgtcttttgggggcaacctcgggcgagcagtcttccaggccaagaagcgggttctcgaacctctcggtctggttgaggaaggcgctaagacggctcctggaaagaagagaccggtagagccatcacctcagcgttcccccgactcctccacgggcatcggcaagaaaggccaccagcccgcgagaaagagactgaactttgggcagactggcgactcggagtcagtccccgaccctcaaccaatcggagaaccaccagcaggcccctctggtctgggatctggtacaatggctgcaggcggtggcgctccaatggcagacaataacgaaggcgccgacggagtgggtagttcctcaggaaattggcattgcgattccacatggctgggcgacagagtcatcaccaccagcacccgaacctgggccctgcccacctacaacaaccatctctacaagcaaatctccaacgggacatcgggaggaagcactaacgacaacacctactttggctacagcaccccctgggggtattttgacttcaacagattccactgccacttctcaccacgtgactggcagcgactcatcaacaataactggggattccggcccaagagactcaacttcaagctcttcaacatccaggtcaaggaggtcacgcagaatgaaggcaccaagaccatcgccaataaccttaccagcacgattcaggtgtttacggactcggaataccagctcccgtacgtccccggctctgcgcaccagggctgcctccctccgttcccggcggacgtcttcatgattcctcagtacgggtatctgaccctaaacaatggcagtcaggctgtgggccgttcctccttctactgcctggaatacttcccttctcaaatgctgaggacgggcaacaactttgaattcagctacaccttcgaggacgtgcctttccacagcagctacgcgcacagccagagcctggaccggctgatgaaccctctcatcgaccagtacctgtattacttatccagaactcagtccacaggaggaactcaaggtactcagcaattgttattttctcaagccgggcccgcaaacatgtcggctcaggccaagaactggctacctggaccgtgttaccgtcagcaacgagtttccacgacactgtcgcaaaacaacaacagcaattttgcttggaccggtgccaccaagtatcacctgaatggcagagactccctggttaatcccggcgttgccatggctacccacaaggacgacgaggagcgcttcttcccgtcaagcggagttctaatgtttggcaagcagggggctggaaaagacaatgtggactacagcagcgtgatgctcaccagcgaagaagaaattaaaactactaacccagtggctacagagcagtatggtgtggtggcagacaacctgcagcagaccaacggagctcccattgtgggaactgtcaacagccagggggccttacctggtatggtctggcaaaaccgggacgtgtacctgcagggccccatctgggccaaaattcctcacacggacggcaactttcatccttcgccgctgatgggaggctttggactgaaacacccgcctcctcagatcctggtgaaaaacactcctgttcctgcggatcctccgaccaccttcagccaggccaagctggcttcttttatcacgcagtacagcaccggacaggtcagcgtggaaatcgaatgggagctgcagaaagaaaacagcaagcgctggaacccagagattcagtatacttccaactactacaaatctacaaatgtggactttgctgtcaatactgagggtacttattcagagcctcgccccattggcactcgttatctcacccgtaatctgtaattgcttgttaatcaataaaccggt

SEQ ID NO: 95 - protein, 738 aa, Adeno-associated virus
MAADGYLPDWLEDNLSEGIREWWDLKPGAPKPKANQQKQDDGRGLVLPGYKYLGPFNGLDKGEPVNAADAAALEHDKAYDQQLKAGDNPYLRYNHADAEFQERLQEDTSFGGNLGRAVFQAKKRVLEPLGLVEEGAKTAPGKKRPVEPSPQRSPDSSTGIGKKGHQPARKRLNFGQTGDSESVPDPQPIGEPPAGPSGLGSGTMAAGGGAPMADNNEGADGVGSSSGNWHCDSTWLGDRVITTSTRTWALPTYNNHLYKQISNGTSGGSTNDNTYFGYSTPWGYFDFNRFHCHFSPRDWQRLINNNWGFRPKRLNFKLFNIQVKEVTQNEGTKTIANNLTSTIQVFTDSEYQLPYVPGSAHQGCLPPFPADVFMIPQYGYLTLNNGSQAVGRSSFYCLEYFPSQMLRTGNNFEFSYTFEDVPFHSSYAHSQSLDRLMNPLIDQYLYYLSRTQSTGGTQGTQQLLFSQAGPANMSAQAKNWLPGPCYRQQRVSTTLSQNNNSNFAWTGATKYHLNGRDSLVNPGVAMATHKDDEERFFPSSGVLMFGKQGAGKDNVDYSSVMLTSEEEIKTTNPVATEQYGVVADNLQQTNGAPIVGTVNSQGALPGMVWQNRDVYLQGPIWAKIPHTDGNFHPSPLMGGFGLKHPPPQILVKNTPVPADPPTTFSQAKLASFITQYSTGQVSVEIEWELQKENSKRWNPEIQYTSNYYKSTNVDFAVNTEGTYSEPRPIGTRYLTRNL

SEQ ID NO: 96 - DNA, 3123 bp, Adeno-associated virus
gaattcgcccttggctgcgtcaactggaccaatgagaactttcccttcaacgattgcgtcgacaagatggtgatctggtgggaggagggcaagatgacggccaaggtcgtggagtccgccaaggccattctcggcggcagcaaggtgcgcgtggaccaaaagtgcaagtcgtccgcccagatcgaccccacccccgtgatcgtcacctccaacaccaacatgtgcgccgtgattgacgggaacagcaccaccttcgagcaccagcagccgttgcaggaccggatgttcaagttcgaactcacccgccgtctggagcacgactttggcaaggtgaccaagcaggaagtcaaagagttcttccgctgggcgcaggatcacgtgaccgaggtggcgcatgagttctacgtcagaaagggcggagccagcaaaagacccgcccccgatgacgcggatataagcgagcccaagcgggcctgcccctcagtcgcggatccatcgacgtcagacgcggaaggagctccggtggactttgccgacaggtaccaaaacaaatgttctcgtcacgcgggcatgctccagatgctgtttccctgcaaaacgtgcgagagaatgaatcagaatttcaacatttgcttcacgcacggggtcagagactgctcagaatgtttccccggtgcatcagaatctcaaccggtcgtcagaaaaaaaacgtatcagaaactgtgtgccattcatcatctgctggggcgggcacccgagattgcttgctcggcctgcgatctggtcaacgtggacctggacgactgtgtttctgagcaataaatgacttaaaccaggtatggctgccgatggttatcttccagattggcttgaggacaacctctctgagggcattcgcgagtggtgggacctgaaacctggagccccgaaacccaaagccaaccagcaaaagcaggacgacggccggggtctggtgcttcctggctacaagtacctcggacccttcaacggactcgacaagggggagcccgtcaacgcggcggacgcagcggccctcgagcacgacaaggcctacgaccagcagctcaaagcgggtgacaatccgtacctgcggtataaccacgccgacgccgagtttcaggagcgtctgcaagaagatacgtcttttgggggcaacctcgggcgagcagtcttccaggccaagaagcgggttctcgaacctctcggtctggttgaggaaggcgctaagacggctcctggaaagaagagaccggtagagccatcacctcagcgttcccccgactcctccacgggcatcggcaagaaaggccaccagcccgcgagaaagagactgaactttgggcagactggcgactcggagtcagtccccgaccctcaaccaatcggagaaccaccagcaggcccctctggtctgggatctggtacaatggctgcaggcggtggcgctccaatggcagacaataacgaaggcgccgacggagtgggtagttcctcaggaaattggcattgcgattccacatggctgggcgacagagtcatcaccaccagcacccgaacctgggccctgcccacctacaacaaccatctctacaagcaaatctccaacgggacatcgggaggaagcactaacgacaacacctactttggctacagcaccccctgggggtattttgacttcaacagattccactgccacttctcaccacgtgactggcagcgactcatcaacaataactggggattccggcccaagagactcaacttcaagctcttcaacatccaggtcaaggaggtcacgcagaatgaaggcaccaagaccatcgccaataaccttaccagcacgattcaggtgtttacggactcggaataccagctcccgtacgtcctcggctctgcgcaccagggctgcctccctccgttcccggcggacgtcttcatgattcctcagtacgggtatctgaccctaaacaatggcagtcaggctgtgggccgttcctccttctactgcctggaatacttcccttctcaaatgctgaggacgggcaacaactttgaattcagctacaccttcgaggacgtgcctttccacagcagctacgcgcacagccagagcctggaccggctgatgaaccctctcatcgaccagtacctgtattacttatccagaactcagtccacaggaggaactcaaggtactcagcaattgttattttctcaagccgggcccgcaaacatgtcggctcaggccaagaactggctacctggaccgtgttaccgtcagcaacgagtttccacgacactgtcgcaaaacaacaacagcaattttgcttggaccggtgccaccaagtatcacctgaatggcagagactccctggttaatcccggcgttgccatggctacccacaaggacgacgaggagcgcttcttcccgtcaagcggagttctaatgtttggcaagcagggggctggaaaagacaatgtggactacagcagcgtgatgctcaccagcgaagaagaaattaaaactactaacccagtggctacagagcagtatggtgtggtggcagacaacctgcagcagaccaacggagctcccattgtgggaactgtcaacagccagggggccttacctggtatggtctggcaaaaccgggacgtgtacctgcagggccccatctgggccaaaattcctcacacggacggcaactttcatccttcgccgctgatgggaggctttggactgaaacacccgcctcctcagatcctggtgaaaaacactcctgttcctgcggatcctccgaccaccttcagccaggccaagctggcttcttttatcacgcagtacagcaccggacaggtcagcgtggaaatcgaatgggagctgcagaaagaaaacagcaagcgctggaacccagagattcagtatacttccaactactacaaatctacaaatgtggactttgctgtcaatactgagggtacttattcagagcctcgccccattggcactcgttatctcacccgtaatctgtaattgcttgttaatcaataaaccggttaattcgtttcagttgaactttggtctctgcgaagggcgaattc

SEQ ID NO: 97 - protein, 738 aa, Adeno-associated virus
MAADGYLPDWLEDNLSEGIREWWDLKPGAPKPKANQQKQDDGRGLVLPGYKYLGPFNGLDKGEPVNAADAAALEHDKAYDQQLKAGDNPYLRYNHADAEFQERLQEDTSFGGNLGRAVFQAKKRVLEPLGLVEEGAKTAPGKKRPVEPSPQRSPDSSTGIGKKGHQPARKRLNFGQTGDSESVPDPQPIGEPPAGPSGLGSGTMAAGGGAPMADNNEGADGVGSSSGNWHCDSTWLGDRVITTSTRTWALPTYNNHLYKQISNGTSGGSTNDNTYFGYSTPWGYFDFNRFHCHFSPRDWQRLINNNWGFRPKRLNFKLFNIQVKEVTQNEGTKTIANNLTSTIQVFTDSEYQLPYVLGSAHQGCLPPFPADVFMIPQYGYLTLNNGSQAVGRSSFYCLEYFPSQMLRTGNNFEFSYTFEDVPFHSSYAHSQSLDRLMNPLIDQYLYYLSRTQSTGGTQGTQQLLFSQAGPANMSAQAKNWLPGPCYRQQRVSTTLSQNNNSNFAWTGATKYHLNGRDSLVNPGVAMATHKDDEERFFPSSGVLMFGKQGAGKDNVDYSSVMLTSEEEIKTTNPVATEQYGVVADNLQQTNGAPIVGTVNSQGALPGMVWQNRDVYLQGPIWAKIPHTDGNFHPSPLMGGFGLKHPPPQILVKNTPVPADPPTTFSQAKLASFITQYSTGQVSVEIEWELQKENSKRWNPEIQYTSNYYKSTNVDFAVNTEGTYSEPRPIGTRYLTRNL

SEQ ID NO: 98 - DNA, 3122 bp, Adeno-associated virus
gaattcgccctttctacggctgcgtcaactggaccaatgagaactttcccttcaacgattgcgtcgacaagatggtgatctggtgggaggagggcaagatgacggccaaggtcgtggagtccgccaaggccattctcggcggcagcaaggtgcgtgtggaccaaaagtgcaagtcttccgcccagatcgatcccacccccgtgatcgtcacctccaacaccaacatgtgcgccgtgattgacgggaacagcgccaccttcgagcaccagcagccgttgcaggaccggatgttcaaatttgaactcacccgccgtctggagcatgactttggcaaggtgacgaagcaggaagtcaaagagttcttccgctgggcgcaggatcacgtgaccgaggtggcgcatgagttccacgtcagaaagggtggagccaacaagagacccgcccccgatgacgcggatataagcgagcccaagcgggcctgcccctcagtcgcggatccatcgacgtcagacgcggaaggagctccggtggactttgccgacaggtaccaaaacaaatgttctcgtcacgcgggcatgcttcagatgctgtttccctgcaagacatgcgagagaatgaatcagaatttcaacatttgcttcacgcacgggaccagagactgttcagaatgtttccccggcgtgtcagaatctcaaccggtcgtcagaaagaggacgtatcggaaactctgtgcgattcatcatctgctggggcgggctcccgagattgcttgctcggcctgcgatctggtcaacgtggacctggatgactgtgtttctgagcaataaatgacttaaaccaggtatggctgccgatggttatcttccagattggctcgaggacaacctctctgagggcattcgcgagtggtgggacttgaaacctggagccccgaaacccaaagccaaccagcaaaagcaggacgacggccggggtctggtgcttcctggctacaagtacctcggacccttcaacggactcgacaagggggagcccgtcaacgcggcggacgcagcggccctcgagcacgacaaagcctacgaccagcagctcaaagcgggtgacaatccgtacctgcggtataatcacgccgacgccgagtttcaggagcgtctgcaagaagatacgtcttttgggggcaacctcgggcgagcagtcttccaggccaagaagcgggttctcgaacctctcggtctggttgaggaaggcgctaagacggctcctggaaagaagagactggtagagcagtcgccacaagagccagactcctcctcgggcatcggcaagacaggccagcagcccgctaaaaagagactcaattttggtcagactggcgactcagagtcagtccccgacccacaacctctcggagaacctccagcagccccctcaggtctgggacctaatacaatggcttcaggcggtggcgctccaatggcagacaataacgaaggcgccgacggagtgggtaattcctcgggaaattggcattgcgattccacatggctgggggacagagtcatcaccaccagcacccgaacctgggccctgcccacctacaacaaccacctctacaagcaaatctccaacggcacctcgggaggaagcaccaacgacaacacctattttggctacagcaccccctgggggtattttgacttcaacagattccactgtcacttttcaccacgtgactggcaacgactcatcaacaacaattggggattccggcccaaaagactcaacttcaagctgttcaacatccaggtcaaggaagtcacgacgaacgaaggcaccaagaccatcgccaataatctcaccagcaccgtgcaggtctttacggactcggagtaccagttaccgtacgtgctaggatccgctcaccagggatgtctgcctccgttcccggcggacgtcttcacggttcctcagtacggctatttaactttaaacaatggaagccaagccctgggacgttcctccttctactgtctggagtatttcccatcgcagatgctgagaaccggcaacaactttcagttcagctacaccttcgaggacgtgcctttccacagcagctacgcgcacagccagagcctggacaggctgatgaatcccctcatcgaccagtacctgtactacctggtcagaacgcaaacgactggaactggagggacgcagactctggcattcagccaagcgggtcctagctcaatggccaaccaggctagaaattgggtgcccggaccttgctaccggcagcagcgcgtctccacgacaaccaaccagaacaacaacagcaactttgcctggacgggagctgccaagtttaagctgaacggccgagactctctaatgaatccgggcgtggcaatggcttcccacaaggatgacgacgaccgcttcttcccttcgagcggggtcctgatttttggcaagcaaggagccgggaacgatggagtggattacagccaagtgctgattacagatgaggaagaaatcaaggctaccaaccccgtggccacagaagaatatggagcagtggccatcaacaaccaggccgccaatacgcaggcgcagaccggactcgtgcacaaccagggggtgattcccggcatggtgtggcagaatagagacgtgtacctgcagggtcccatctgggccaaaattcctcacacggacggcaactttcacccgtctcccctgatgggcggctttggactgaagcacccgcctcctcaaattctcatcaagaacacaccggttccagcggacccgccgcttaccttcaaccaggccaagctgaactctttcatcacgcagtacagcaccggacaggtcagcgtggaaatcgagtgggagctgcagaaagaaaacagcaaacgctggaatccagagattcaatacacttccaactactacaaatctacaaatgtggactttgctgtcaacacggaaggagtttatagcgagcctcgccccattggcacccgttacctcacccgcaacctgtaattacatgttaatcaataaaccggttaattcgtttcagttgaactttggtctctgcgaagggcgaattc

SEQ ID NO: 99 - protein, 736 aa, Adeno-associated virus
MAADGYLPDWLEDNLSEGIREWWDLKPGAPKPKANQQKQDDGRGLVLPGYKYLGPFNGLDKGEPVNAADAAALEHDKAYDQQLKAGDNPYLRYNHADAEFQERLQEDTSFGGNLGRAVFQAKKRVLEPLGLVEEGAKTAPGKKRLVEQSPQEPDSSSGIGKTGQQPAKKRLNFGQTGDSESVPDPQPLGEPPAAPSGLGPNTMASGGGAPMADNNEGADGVGNSSGNWHCDSTWLGDRVITTSTRTWALPTYNNHLYKQISNGTSGGSTNDNTYFGYSTPWGYFDFNRFHCHFSPRDWQRLINNNWGFRPKRLNFKLFNIQVKEVTTNEGTKTIANNLTSTVQVFTDSEYQLPYVLGSAHQGCLPPFPADVFTVPQYGYLTLNNGSQALGRSSFYCLEYFPSQMLRTGNNFQFSYTFEDVPFHSSYAHSQSLDRLMNPLIDQYLYYLVRTQTTGTGGTQTLAFSQAGPSSMANQARNWVPGPCYRQQRVSTTTNQNNNSNFAWTGAAKFKLNGRDSLMNPGVAMASHKDDDDRFFPSSGVLIFGKQGAGNDGVDYSQVLITDEEEIKATNPVATEEYGAVAINNQAANTQAQTGLVHNQGVIPGMVWQNRDVYLQGPIWAKIPHTDGNFHPSPLMGGFGLKHPPPQILIKNTPVPADPPLTFNQAKLNSFITQYSTGQVSVEIEWELQKENSKRWNPEIQYTSNYYKSTNVDFAVNTEGVYSEPRPIGTRYLTRNL

SEQ ID NO: 100 - DNA, 3117 bp, Adeno-associated virus
gaattcgcccttggctgcgtcaactggaccaatgagaactttcccttcaacgattgcgtcgacaagatggtgatctggtgggaggagggcaagatgacggccaaggtcgtggagtccgccaaggccattctcggcggcagcaaggtgcgtgtggaccaaaagtgcaagtcttccgcccagatcgatcccacccccgtgatcgtcacctccaacaccaacatgtgcgccgtgattgacgggaacagcaccaccttcgagcaccagcagccgttgcaggaccggatgttcaaatttgaactcacccgccgtctggagcatgactttggcaaggtgacgaagcaggaagtcaaagagttcttccgctgggcgcaggatcacgtgaccgaggtggcgcatgagttccacgtcagaaagggtggagccaacaagagacccgcccccgatgacgcggatataagcgagcccaagcgggcctgcccctcagtcgcggatccatcgacgtcagacgcggaaggagctccggtggactttgccgacaggtaccaaaacaaatgttctcgtcacgcgggcatgcttcagatgctgtttccctgcaagacatgcgagagaatgaatcagaatttcaacatttgcttcacgcacgggaccagagactgttcagaatgtttccccggcgtgtcagaatctcaaccggtcgtcagaaagaggacgtatcggaaactctgtgcgattcatcatctgctggggcgggctcccgagattgcttgctcggcctgcgatctggtcaacgtggacctggatgactgtgtttctgagcaataaatgacttaaaccaggtatggctgccgatggttatcttccagattggctcgaggacaacctctctgagggcattcgcgagtggtgggacttgaaacctggagccccgaaacccaaagccaaccagcaaaagcaggacgacggccggggtctggtgcttcctggctacaagtacctcggacccttcaacggactcgacaagggggagcccgtcaacgcggcggacgcagcggccctcgagcacgacaaagcctacgaccagcagctcaaagcgggtgacaatccgtacctgcggtataatcacgccgacgccgagtttcaggagcgtctgcaagaagatacgtcttttgggggcaacctcgggcgagcagtcttccaggccaagaagcgggttctcgaacctctcggtctggttgaggaaggcgctaagacggctcctggaaagaagagaccggtagagcagtcgccacaagagccagactcctcctcgggcatcggcaagacaggccagcagcccgctaaaaagagactcaattttggtcagactggcgactcagagtcagtccccgacccacaacctctcggagaacctccagcagccccctcaggtctgggacctaatacaatggcttcaggcggtggcgctccaatggcagacaataacgaaggcgccgacggagtgggtaattcctcgggaaattggcattgcgattccacatggctgggggacagagtcatcaccaccagcacccgaacctgggccctgcccacctacaacaaccacctctacaagcaaatctccaacggcacctcgggaggaagcaccaacgacaacacctattttggctacagcaccccctgggggtattttgacttcaacagattccactgtcacttttcaccacgtgactggcaacgactcatcaacaacaattggggattccggcccaaaagactcaacttcaagctgttcaacatccaggtcaaggaagtcacgacgaacgaaggcaccaagaccatcgccaataatctcaccagcaccgtgcgggtctttacggactcggagtaccagttaccgtacgtgctaggatccgctcaccagggatgtctgcctccgttcccggcggacgtcttcatggttcctcagtacggctatttaactttaaacaatggaagccaagccctgggacgttcctccttctactgtctggagtatttcccatcgcagatgctgagaaccggcaacaactttcagttcagctacaccttcgaggacgtgcctttccacagcagctacgcgcacagccagagcctggacaggctgatgaatcccctcatcgaccagtacctgtactacctggtcagaacgcaaacgactggaactggagggacgcagactctggcattcagccaagcgggtcctagctcaatggccaaccaggctagaaattgggtgcccggaccttgctaccggcagcagcgcgtctccacgacaaccaaccagagcaacaacagcaactttgcctggacgggagctgccaagtttaagctgaacggccgagactctctaatgaatccgggcgtggcaatggcttcccacaaggatgacgacgaccgcttcttcccttcgagcggggtcctgatttttggcaagcaaggagccgggaacgatggagtggattacagccaagtgctgattacagatgaggaagaaatcaaggctaccaaccccgtggccacagaagaatatggagcagtggccatcaacaaccaggccgccaatacgcaggcgcagaccggactcgtgcacaaccagggggtgattcccggcatggtgtggcagaatagagacgtgtacctgcagggtcccatctgggccaaaattcctcacacggacggcaactttcacccgtctcccctgatgggcggctttggactgaagcacccgcctcctcaaattctcatcaagaacacaccggttccagcggacccgccgcttaccttcaaccaggccaagctgaactctttcatcacgcagtacagcaccggacaggtcagcgtggaaatcgagtgggagctgcagaaagaaaacagcaaacgctggaatccagagattcaatacacttccaactactacaaatctacaaatgtggactttgctgtcaacacggaaggagtttatagcgagcctcgccccattggcacccgttacctcacccgcaacctgtaattacatgttaatcaataaaccggttaattcgtttcagttgaactttggtctctgcgaagggcgaattc

SEQ ID NO: 101 - protein, 736 aa, Adeno-associated virus
MAADGYLPDWLEDNLSEGIREWWDLKPGAPKPKANQQKQDDGRGLVLPGYKYLGPFNGLDKGEPVNAADAAALEHDKAYDQQLKAGDNPYLRYNHADAEFQERLQEDTSFGGNLGRAVFQAKKRVLEPLGLVEEGAKTAPGKKRPVEQSPQEPDSSSGIGKTGQQPAKKRLNFGQTGDSESVPDPQPLGEPPAAPSGLGPNTMASGGGAPMADNNEGADGVGNSSGNWHCDSTWLGDRVITTSTRTWALPTYNNHLYKQISNGTSGGSTNDNTYFGYSTPWGYFDFNRFHCHFSPRDWQRLINNNWGFRPKRLNFKLFNIQVKEVTTNEGTKTIANNLTSTVRVFTDSEYQLPYVLGSAHQGCLPPFPADVFMVPQYGYLTLNNGSQALGRSSFYCLEYFPSQMLRTGNNFQFSYTFEDVPFHSSYAHSQSLDRLMNPLIDQYLYYLVRTQTTGTGGTQTLAFSQAGPSSMANQARNWVPGPCYRQQRVSTTTNQSNNSNFAWTGAAKFKLNGRDSLMNPGVAMASHKDDDDRFFPSSGVLIFGKQGAGNDGVDYSQVLITDEEEIKATNPVATEEYGAVAINNQAANTQAQTGLVHNQGVIPGMVWQNRDVYLQGPIWAKIPHTDGNFHPSPLMGGFGLKHPPPQILIKNTPVPADPPLTFNQAKLNSFITQYSTGQVSVEIEWELQKENSKRWNPEIQYTSNYYKSTNVDFAVNTEGVYSEPRPIGTRYLTRNL

SEQ ID NO: 102 - DNA, 3121 bp, Adeno-associated virus
gaattcgcccttctacggctgcgtcaactggaccaatgagaactttcccttcaacgattgcgtcgacaagatggtgatctggtgggaggagggcaagatgacggccaaggtcgtggagtccgccaaggccattctcggcggcagcaaggtgcgtgtggaccaaaagtgcaagtcttccgcccagatcgatcccacccccgtgatcgtcacctccaacaccaacatgtgcgccgtgattgacgggaacagcaccaccttcgagcaccagcagccgttgcaggaccggatgttcaaatttgaactcacccgccgtctggagcatgactttggcaaggtgacgaagcaggaagtcaaagagttcttccgctgggcgcaggatcacgtgaccgaggtggcgcatgagttccacgtcagaaagggtggcgccaacaagagacccgcccccgatgacgcggatataagcgagcccaagcgggcctgcccctcagtcgcggatccatcgacgtcagacgcggaaggagctccggtggactttgccgacaggtaccaaaacaaatgttctcgtcacgcgggcatgcttcagatgctgtttccctgcaagacatgcgagagaatgaatcagaatttcaacatttgcttcacgcacgggaccagagactgttcagaatgtttccccggcgtgtcagaatctcaaccggtcgtcagaaagaggacgtatcggaaactctgtgcgattcatcatctgctggggcgggctcccgagattgcttgctcggcctgcgatctggtcaacgtggacctggatgactgtgtttctgagcaataaatgacttaaaccaggtatggctgccgatggttatcttccagattggctcgaggacaacctctctgagggcattcgcgagtggtgggacttgaaacctggagccccgaaacccaaagccaaccagcaaaagcaggacgacggccggggtctggtgcttcctggctacaagtacctcggacccttcaacggactcgacaagggggagcccgtcaacgcggcggacgcagcggccctcgagcacgacaaagcctacgaccagcagctcaaagcgggtgacaatccgtacctgcggtataatcacgccgacgccgagtttcaggagcgtctgcaagaagatacgtcctttgggggcaacctcgggcgagcagtcttccaggccaagaagcgggttctcgaacctctcggtctggttgaggaaggcgctaagacggctcctggaaagaagagaccggtagagcagtcgccacaagagccagactcctcctcgggcatcggcaagacaggccagcagcccgctaaaaagagactcaattttggtcagactggcgactcagagtcagtccccgacccacaacctctcggagaacctccagcagccccctcaggtctgggacctaatacaatggcttcaggcggtggcgctccaatggcagacaataacgaaggcgccgacggagtgggtaattcctcgggaaattggcattgcgattccacatggctgggggacagagtcatcaccaccagcacccgaacctgggccctgcccacctacaacaaccacctctacaagcaaatctccaacggcacctcgggaggaagcaccaacgacaacacctattttggctacagcaccccctgggggtattttgacttcaacagattccactgtcacttttcaccacgtgactggcaacgactcatcaacaacaattggggattccggcccaaaagactcaacttcaagctgttcaacatccaggtcaaggaagtcacgacgaacgaaggcaccaagaccatcgccaataatctcaccagcaccgtgcaggtctttacggacttggagtaccagttaccgtacgtgctaggatccgctcaccagggatgtctgcctccgttcccggcggacgtcttcatggttcctcagtacggctatttaactttaaacaatggaagccaagccctgggacgttcctccttctactgtctggagtatttcccatcgcagatgccgagaaccggcaacaactttcagttcagctacaccttcgaggacgtgcctttccacagcagctacgcgcacagccagagcctggacaggctgatgaatcccctcatcgaccagtacctgtactacctggtcagaacgcaaacgactggaactggagggacgcagactctggcattcagccaagcgggtcctagctcaatggccaaccaggctagaaattgggtgcccggaccttgctaccggcagcagcgcgtctccacgacaaccaaccagaacaacaacagcaactttgcctggacgggagctgccaagtttaagctgaacggccgagactctctaatgaatccgggcgtggcaatggcttcccacaaggatgacgacgaccgcttcttcccttcgagcggggtcctgatttttggcaagcaaggagccgggaacgatggagtggattacagccaagtgctgattacagatgaggaagaaatcaaggctaccaaccccgtggccacagaagaatatggagcagtggccatcaacaaccaggccgccaatacgcaggcgcagaccggactcgtgcacaaccagggggtgattcccggcatggtgtggcagaatagagacgtgtacctgcagggtcccatctgggccaaaattcctcacacggacggcaactttcacccgtctcccctgatgggcggctttggactgaagcacccgcctcctcaaattctcatcaagaacacaccggttccagcggacccgccgcttaccttcaaccaggccaagctgaactctttcatcacgcagtacagcaccggacaggtcagcgtggaaatcgagtgggagctgcagaaagaaaacagcaaacgctggaatccagagattcaatacacttccaactactacaaatctacaaatgtggactttgctgtcaacacggaaggagtttatagcgagcctcgccccattggcacccgttacctcacccgcaacctgtaattacatgttaatcaataaaccggttaattcgtttcagttgaactttggtctctgcgaagggcgaattc

SEQ ID NO: 103 - protein, 736 aa, Adeno-associated virus
MAADGYLPDWLEDNLSEGIREWWDLKPGAPKPKANQQKQDDGRGLVLPGYKYLGPFNGLDKGEPVNAADAAALEHDKAYDQQLKAGDNPYLRYNHADAEFQERLQEDTSFGGNLGRAVFQAKKRVLEPLGLVEEGAKTAPGKKRPVEQSPQEPDSSSGIGKTGQQPAKKRLNFGQTGDSESVPDPQPLGEPPAAPSGLGPNTMASGGGAPMADNNEGADGVGNSSGNWHCDSTWLGDRVITTSTRTWALPTYNNHLYKQISNGTSGGSTNDNTYFGYSTPWGYFDFNRFHCHFSPRDWQRLINNNWGFRPKRLNFKLFNIQVKEVTTNEGTKTIANNLTSTVQVFTDLEYQLPYVLGSAHQGCLPPFPADVFMVPQYGYLTLNNGSQALGRSSFYCLEYFPSQMPRTGNNFQFSYTFEDVPFHSSYAHSQSLDRLMNPLIDQYLYYLVRTQTTGTGGTQTLAFSQAGPSSMANQARNWVPGPCYRQQRVSTTTNQNNNSNFAWTGAAKFKLNGRDSLMNPGVAMASHKDDDDRFFPSSGVLIFGKQGAGNDGVDYSQVLITDEEEIKATNPVATEEYGAVAINNQAANTQAQTGLVHNQGVIPGMVWQNRDVYLQGPIWAKIPHTDGNFHPSPLMGGFGLKHPPPQILIKNTPVPADPPLTFNQAKLNSFITQYSTGQVSVEIEWELQKENSKRWNPEIQYTSNYYKSTNVDFAVNTEGVYSEPRPIGTRYLTRNL

SEQ ID NO: 104 - DNA, 3122 bp, Adeno-associated virus
gaattcgccctttctacggctgcgtcaactggaccaatgagaactttcccttcaacgattgcgtcgacaagatggtgatctggtgggaggagggcaagatgacggccaaggtcgtggagtccgccaaggccattctcggcggcagcaaggtgcgtgtggaccaaaagtgcaagtcttccgcccagatcgatcccacccccgtgatcgtcacctccaacaccaacatgtgcgccgtgattgacgggaacagcaccaccttcgagcaccagcagccgttgcaggaccggatgttcaaatttgaactcacccgccgtctggagcatgactttggcaaggtgacgaagcaggaagtcaaagggttcttccgctgggcgcaggatcacgtgaccgaggtggcgcatgagttccacgtgcgagcccaagcgggcctgcccctcagtcgcggatccatcgacgtcagaccagaaagggtggagccaacaagagacccgcccccgatgacgcggatataagcggaaggagctccggtggactttgccgacaggtaccaaaacaaatgttctcgtcacgcgggcatgcttcagatgctgtttccctgcaagacatgcgagagaatgaatcagaatttcaacatttgcttcacgcacgggaccagagactgttcagaatgtttccccggcgtgtcagaatctcaaccggtcgtcagaaagaggacgtatcggaaactctgtgcgattcatcatctgctggggcgggctcccgagattgcttgctcggcctgcgatctggtcaacgtggacctggatgactgtgtttctgagcaataaatgacttaaaccaggtatggctgccgatggttatcttccagattggctcgaggacaacctctctgagggcattcgcgagtggtgggacttgaaacctggagccccgaaacccaaagccaaccagcaaaagcaggacgacggccggggtctggtgcttcctggctacaagtacctcggacccttcaacggactcgacaagggggagcccgtcaacgcggcggacgcagcggccctcgagcacgacaaagcctacgaccagcagctcaaagcgggtgacaatccgtacctgcggtataatcacgccgacgccgagtttcaggagcgtctgcaagaagatacgtcttttgggggcaacctcgggcgagcagtcttccaggccaagaagcgggttctcgaacctctcggtctggttgaggaaggcgctaagacggctcctggaaagaagagaccggtagagcagtcgccacaagagccagactcctcctcgggcatcggcaagacaggccagcagcccgctaaaaagagactcaattttggtcagactggcgactcagagtcagtccccgacccacaacctctcggagaacctccagcagccccctcaggtctgggacctaatacaatggcttcaggcggtggcgctccaatggcagacaataacgaaggcgccgacggagtgggtaattcctcgggaaattggcattgcgattccacatggctgggggacagagtcatcaccaccagcacccgaacctgggccctgcccacctacaacaaccacctctacaagcaaatctccaacggcacctcgggaggaagcaccaacgacaacacctattttggctacagcaccccctgggggtattttgacttcaacagattccactgtcacttttcaccacgtgactggcaacgactcatcaacaacaattggggattccggcccaaaagactcaacttcaagctgttcaacatccaggtcaaggaagtcacgacgaacgaaggcaccaagaccatcgccaataatctcaccagcaccgtgcaggtctttacggactcggagtaccagttaccgtacgtgctaggatccgctcaccagggatgtctgcctccgttcccggcggacgtcttcatggttcctcagtacggctatttaactttaaacaatggaagccaagccctgggacgttcctccttctactgtctggagtatttcccatcgcagatgctgagaaccggcaacaactttcagttcagctacaccttcgaggacgtgcctttccacagcagctacgcgcacagccagagcctggacaggctgatgaatcccctcatcgaccagtacctgtactacctggtcagaacgcaaacgactggaactggagggacgcagactctggcattcagccaagcgggtcctagctcaatggccaaccaggctagaaattgggtgcccggaccttgctaccggcagcagcgcgtctccacgacaaccaaccagaacaacaacagcaactttgcctggacgggagctgccaagtttaagctgaacggccgagactctctaatgaatccgggcgtggcaatggcttcccacaaggatgacgacgaccgcttcttcccttcgagcggggtcctgatttttggcaagcaaggagccgggaacgatggagtggattacagccaagtgctgattacagatgaggaagaaatcaaggctaccaaccccgtggccacagaagaatatggagcagtggccatcaacaaccaggccgccaatacgcaggcgcagaccggactcgtgcacaaccagggggtgattcccggcatggtgtggcagaatagagacgtgtacctgcagggtcccatctgggccaaaattcctcacacggacggcaactttcacccgtctcccctgatgggcggctttggactgaagcacccgcctcctcaaattctcatcaagaacacaccggttccagcggacccgccgcttaccttcaaccaggccaagctgaactctttcatcacgcagtacagcaccggacaggtcagcgtggaaatcgagtgggagctgcagaaagaaaacagcaaacgctggaatccagagattcaatacacttccaactactacaaatctacaaatgtggactttgctgtcaacacggagggggtttatagcgagcctcgccccattggcacccgttacctcacccgcaacctgtaattacatgttaatcaataaaccggttaattcgtttcagttgaactttggtctctgcgaagggcgaattc

SEQ ID NO: 105 - protein, 736 aa, Adeno-associated virus
MAADGYLPDWLEDNLSEGIREWWDLKPGAPKPKANQQKQDDGRGLVLPGYKYLGPFNGLDKGEPVNAADAAALEHDKAYDQQLKAGDNPYLRYNHADAEFQERLQEDTSFGGNLGRAVFQAKKRVLEPLGLVEEGAKTAPGKKRPVEQSPQEPDSSSGIGKTGQQPAKKRLNFGQTGDSESVPDPQPLGEPPAAPSGLGPNTMASGGGAPMADNNEGADGVGNSSGNWHCDSTWLGDRVITTSTRTWALPTYNNHLYKQISNGTSGGSTNDNTYFGYSTPWGYFDFNRFHCHFSPRDWQRLINNNWGFRPKRLNFKLFNIQVKEVTTNEGTKTIANNLTSTVQVFTDSEYQLPYVLGSAHQGCLPPFPADVFMVPQYGYLTLNNGSQALGRSSFYCLEYFPSQMLRTGNNFQFSYTFEDVPFHSSYAHSQSLDRLMNPLIDQYLYYLVRTQTTGTGGTQTLAFSQAGPSSMANQARNWVPGPCYRQQRVSTTTNQNNNSNFAWTGAAKFKLNGRDSLMNPGVAMASHKDDDDRFFPSSGVLIFGKQGAGNDGVDYSQVLITDEEEIKATNPVATEEYGAVAINNQAANTQAQTGLVHNQGVIPGMVWQNRDVYLQGPIWAKIPHTDGNFHPSPLMGGFGLKHPPPQILIKNTPVPADPPLTFNQAKLNSFITQYSTGQVSVEIEWELQKENSKRWNPEIQYTSNYYKSTNVDFAVNTEGVYSEPRPIGTRYLTRNL

SEQ ID NO: 106 - DNA, 2370 bp, Adeno-associated virus
gaattcgccctttctacggctgcgtcaactggaccaatgagaactttcccttcaacgattgcgtcgacaagatggtgatctggtgggaggagggcaagatgacggccaaggtcgtggagtccgccaaggccattctcggcggcagcaaggtgcgcgtggaccaaaagtgcaagtcgtccgcccagatcgaccccacccccgtgatcgtcacctccaacaccaacatgtgcgccgtgattgacgggaacagcaccaccttcgagcaccagcagccgttgcaggaccggatgttcaagttcgaactcacccgccgtctggagcacgactttggcaaggtgaccaagcaggaagtcaaagagttcttccgctgggcgcaggatcacgtgaccgaggtggcgcatgagttctacgtcagaaagggcggagccagcaaaagacccgcccccgatgacgcggatataagcgagcccaagcgggcctgcccctcagtcgcggatccatcgacgtcagacgcggaaggagctccggtggactttgccgacaggtaccaaaacaaatgttctcgtcacgcgggcatgcttcagacgctgtttccctgcaaaacgtgcgagagaatgaatcagaatttcaacatttgcttcacgcacggggtcagagactgctcagaatgtttccccggtgcatcagaatctcaaccggtcgtcagaaaaaaaacgtatcagaaactgtgtgccattcatcatctgctggggcgggcacccgagattgcttgctcggcctgcgatctggtcaacgtggacctggacgactgtgtttctgagcaataaatgacttaaaccaggtatggctgccgatggttatcttccagattggcttgaggacaacctctctgagggcattcgcgagtggtgggacctgaaacctggagccccgaaacccaaagccaaccagcaaaagcaggacgacggccggggtctggtgcttcctggctacaagtacctcggacccttcaacggactcgacaagggggagcccgtcaacgcggcggacgcagcggccctcgagcacgacaaggcctacgaccagcagctcaaagcgggtgacaatccgtacctgcggtataaccacgccgacgccgagtttcaggagcgtctgcaagaagatacgtcttttgggggcaacctcgggcgagcagtcttccaggccaagaagcgggttctcgaacctctcggtctggttgaggaaggcgctaagacggctcctggaaagaagagaccggtagagccatcacctcagcgttcccccgactcctccacgggcatcggcaagaaaggccaccagcccgcgagaaagagactgaactttgggcagactggcgactcggagtcagtccccgaccctcaaccaatcggagaaccaccagcaggcccctctggtctgggatctggtacaatggctgcaggcggtggcgctccaatggcagacaataacgaaggcgccgacggagtgggtagttcctcaggaaattggcattgcgattccacatggctgggcgacagagtcatcaccaccagcacccgaacctgggccctgcccacctacaacaaccatctctacaagcaaatctccaacgggacatcgggaggaagcactaacgacaacacctactttggctacagcaccccctgggggtattttgacttcaacagattccactgccacttctcaccacgtgactggcagcgactcatcaacaataactggggattccggcccaagagactcaacttcaagctcttcaacatccaggtcaaggaggtcacgcagaatgaaggcaccaagaccatcgccaataaccttaccagcacgattcaggtgtttacggactcggaataccagctcccgtacgtcctcggctctgcgcaccagggctgcctccctccgttcccggcggacgtcttcatgattcctcagtacgggtatctgaccctaaacaatggcagtcaggctgtgggccgttcctccttctactgcctggaatacttcccttctcaaatgctgaggacgggcaacaactttgaattcagctacaccttcgaggacgtgcctttccacagcagctacgcgcacagccagagcctggaccggctgatgaaccctctcatcgaccagtacctgtattacttatccagaactcagtccacaggaggaactcaaggtactcagcaattgttattttctcaagccgggcccgcaaacatgtyggctcaggccaagaactggctacctggaccgtgttaccgtcagcaacgagtttccacgacactgtcgcaaaacaacaacagcaattttgctggaccggtgccacca

SEQ ID NO: 107 - protein, 738 aa, Adeno-associated virus; identical to SEQ ID NO: 97

SEQ ID NO: 108 - DNA, 2205 bp, Adeno-associated virus
atgactgacggttaccttccagattggctagaggacaacctctctgaaggcgttcgagagtggtgggcgctgcaacctggagcccctaaacccaaggcaaatcaacaacatcaggacaacgctcggggtcttgtgcttccgggttacaaatacctcggacccggcaacggactcgacaagggggaacccgtcaacgcagcggacgcggcagccctcgagcacgacaaggcctacgaccagcagctcaaggccggtgacaacccctacctcaagtacaaccacgccgacgcggagttccagcagcggcttcagggcgacacatcgtttgggggcaacctcggcagagcagtcttccaggccaaaaagagggttcttgaacctcttggtctggttgagcaagcgggtgagacggctcctggaaagaagagaccgttgattgaatccccccagcagcccgactcctccacgggtatcggcaaaaaaggcaagcagccggctaaaaagaagctcgttttcgaagacgaaactggagcaggcgacggaccccctgagggatcaacttccggagccatgtctgatgacagtgagatgcgtgcagcagctggcggagctgcagtcgagggcggacaaggtgccgatggagtgggtaatgcctcgggtgattggcattgcgattccacctggtctgagggccacgtcacgaccaccagcaccagaacctgggtcttgcccacctacaacaaccacctctacaagcgactcggagagagcctgcagtccaacacctacaacggattctccaccccctggggatactttgacttcaaccgcttccactgccacttctcaccacgtgactggcagcgactcatcaacaacaactggggcatgcgacccaaagccatgcgggtcaaaatcttcaacatccaggtcaaggaggtcacgacgtcgaacggcgagacaacggtggctaataaccttaccagcacggttcagatctttgcggactcgtcgtacgaactgccgtacgtgatggatgcgggtcaagagggcagcctgcctccttttcccaacgacgtctttatggtgccccagtacggctactgtggactggtgaccggcaacacttcgcagcaacagactgacagaaatgccttctactgcctggagtactttccttcgcagatgctgcggactggcaacaactttgaaattacgtacagttttgagaaggtgcctttccactcgatgtacgcgcacagccagagcctggaccggctgatgaaccctctcatcgaccagtacctgtggggactgcaatcgaccaccaccggaaccaccctgaatgccgggactgccaccaccaactttaccaagctgcggcctaccaacttttccaactttaaaaagaactggctgcccgggccttcaatcaagcagcagggcttctcaaagactgccaatcaaaactacaagatccctgccaccgggtcagacagtctcatcaaatacgagacgcacagcactctggacggaagatggagtgccctgacccccggacctccaatggccacggctggacctgcggacagcaagttcagcaacagccagctcatctttgcggggcctaaacagaacggcaacacggccaccgtacccgggactctgatcttcacctctgaggaggagctggcagccaccaacgccaccgatacggacatgtggggcaacctacctggcggtgaccagagcaacagcaacctgccgaccgtggacagactgacagccttgggagccgtgcctggaatggtctggcaaaacagagacatttactaccagggtcccatttgggccaagattcctcataccgatggacactttcacccctcaccgctgattggtgggtttgggctgaaacacccgcctcctcaaatttttatcaagaacaccccggtacctgcgaatcctgcaacgaccttcagctctactccggtaaactccttcattactcagtacagcactggccaggtgtcggtgcagattgactgggagatccagaaggagcggtccaaacgctggaaccccgaggtccagtttacctccaactacggacagcaaaactctctgttgtgggctcccgatgcggctgggaaatacactgagcctagggctatcggtacccgctacctcacccaccacctgtaa

SEQ ID NO: 109 - protein, 734 aa, Adeno-associated virus; identical to SEQ ID NO: 81

SEQ ID NO: 110 - DNA, 3128 bp, Adeno-associated virus
gaattcgccctttctacggctgcgtcaactggaccaatgagaactttcccttcaacgattgcgtcgacaagatgttgatctggtgggaggagggcaagatgacggccaaggtcgtggagtccgccaaggccattctcggcggcagcaaagtgcgcgtggaccaaaagtgcaagccgtccgcccagatcgaccccacccccgtgatcgtcacctccaacaccaacatgtgcgccgtgattgacgggaacagcaccaccttcgagcaccagcagccgttgcgggaccggatgttcaagtttgaactcacccgccgtctggagcacgactttggcaaggtgacaaagcaggaagtcagagagttcttccgctgggcgcaggatcacgtgaccgaggtggcgcacgagttctacgtcagaaagggtggagccaacaagagacccgcccccgatgacgcggataaaagcgagcccaagcgggcctgcccctcagtcgcggatccatcgacgtcagacgcggaaggagctccggtggactttgccgacaggtaccaaaacaaatgttctcgtcacgcgggcatgcttcagatgctgtttccctgcaaaacatgcgagagaatgaatcagaatttcaacatttgcttcacgcacgggaccagagactgttcagaatgtttccccggcgtgtcagaatctcaaccggtcgtcagaaaaaagacgtatcggaaactctgtgcgattcatcatctgctggggcgggcacccgagattgcttgctcggcctgcgatctggtcaacgtggacctagatgactgtgtttctgagcaataaatgacttaaaccaggtatggctgccgatggttatcttccagattggctcgaggacaacctctctgagggcattcgcgagtggtgggacttgaaacctggagccccgaaacccaaagccaaccagcaaaagcaggacgacggccggggtctggtgcttcctggctacaagtacctcggacccttcaacggactcgacaagggggagcccgtcaacgcggcggacgcagcggccctcgagcacgacaaggcctacgaccagcagctcaaagcgggtgacaatccgtacctgcggtataaccacgccgacgccgagtttcaggagcgtctgcaagaagatacgtcttttgggggcaacctcgggcgagcagtcttccaggccaagaagcgggttctcgaacctctcggtctggttgaggaaggcgctaagacggctcctggaaagaagagaccggtagagccatcaccccagcgttctccagactcctctacgggcatcggcaagaaaggccagcagcccgcgaaaaagagactcaactttgggcagactggcgactcagagtcagtgcccgaccctcaaccaatcggagaaccccccgcaggcccctctggtctgggatctggtacaatggctgcaggcggtggcgctccaatggcagacaataacgaaggcgccgacggagtgggtagttcctcaggaaattggcattgcgattccacatggctgggcgacagagtcatcaccaccagcacccgaacctgggccctccccacctacaacaaccacctctacaagcaaatctccaacgggacttcgggaggaagcaccaacgacaacacctacttcggctacagcaccccctgggggtattttgactttaacagattccactgccacttctcaccacgtgactggcagcgactcatcaacaacaactggggattccggcccaagagactcaacttcaagctcttcaacatccaggtcaaggaggtcacgcagaatgaaggcaccaagaccatcgccaataaccttaccagcacgattcaggtctttacggactcggaataccagctcccgtacgtcctcggctctgcgcaccagggctgcctgcctccgttcccggcggacgtcttcatgattcctcagtacgggtacctgactctgaacaatggcagtcaggccgtgggccgttcctccttctactgcctggagtactttccttctcaaatgctgagaacgggcaacaactttgagttcagctaccagtttgaggacgtgccttttcacagcagctacgcgcacagccaaagcctggaccggctgatgaaccccctcatcgaccagtacctgtactacctgtctcggactcagtccacgggaggtaccgcaggaactcagcagttgctattttctcaggccgggcctaataacatgtcggctcaggccaaaaactggctacccgggccctgctaccggcagcaacgcgtctccacgacactgtcgcaaaataacaacagcaactgtaaatcccggtgtcgctatggcaacccacaaggacgacgaagagcgattttgcctggaccggtgccaccaagtatcatctgaatggcagagactctctgttttccgtccagcggagtcttaatgtttgggaaacagggagctggaaaagacaacgtggactatagcagcgttatgctaaccagtgaggaagaaattaaaaccaccaacccagtggccacggaacagtacggcgtggtggccgataacctgcaacagcaaaacgccgctcctattgtaggggccgtcaacagtcaaggagccttacctggcatggtctggcagaaccgggacgtgtacctgcagggtcctatctgggccaagattcctcacacggacggaaactttcatccctcgccgctgatgggaggctttggactgaaacacccgcctcctcagatcctgattaagaatacacctgttcccgcggatcctccaactaccttcagtcaagctaagctggcgtcgttcatcacgcagtacagcaccggacaggtcagcgtggaaattgaatgggagctgcagaaagaaaacagcaaacgctggaacccagagattcaatacacttccaactactacaaatctacaaatgtggacttcgctgttaacacagatggcacttattctgagcctcgccccattggcacccgttacctcacccgtaatctgtaattgctcgttaatcaataaaccggttgattcgtttcagttgaactttggtctctgcgaagggcgaattc

SEQ ID NO: 111 - protein, 738 aa, Adeno-associated virus; identical to SEQ ID NO: 31

SEQ ID NO: 112 - DNA, 3128 bp, Adeno-associated virus
gaattcgccctttctacggctgcgtcaactggaccaatgagaactttcccttcaacgattgcgtcgacaagatggtgatctggtgggaggagggcaagatgacggccaaggtcgtggagtccgccaaggccattctcggcggcagcaaagtgcgcgtggaccaaaagtgcaagtcgtccgcccagatcgaccccacccccgtgatcgtcacctccaacaccaacatgtgcgccgtgattgacgggaacagcaccaccttcgagcaccagcagccgttgcaggaccggatgttcaagtttgaactcacccgccgtctggagcacgactttggcaaggtgacaaagcaggaagtcagagagttcttccgctgggcgcaggatcacgtgaccgaggtggcgcacgagttctacgtcagaaagggtggagccaacaagagacccgcccccgatgacgcggataaaagcgagcccaagcgggcctgcccctcagtcgcggatccatcgacgtcagacgcggaaggagctccggtggactttgccgacaggtaccaaaacaaatgttctcgtcacgcgggcatgcttcagatgctgtttccctgcaaaacatgcgagagaatgaatcagaatttcaacatttgcttcacgcacgggaccagagactgttcagaatgtttccccggcgtgtcagaatctcaaccggttgtcagaaaaaagacgtatcggaaactctgtgcgattcatcatctgctggggcgggcacccgagattgcttgctcggcctgcgatctggtcaacgtggacctagatgactgtgtttctgagcaataaatgacttaaaccaggtatggctgccgatggttatcttccagattggctcgaggacaacctctctgagggcattcgcgagtggtgggacttgaaacctggagccccgaaacccaaagccaaccagcaaaagcaggacgacggccggggtctggtgcttcctggctacaagtacctcggacccttcaacggactcgacaagggggagcccgtcaacgcggcggacgcagcggccctcgagcacgacaaggcctacgaccagcagctcaaagcgggtgacaatccgtacctgcggtataaccacgccgacgccgagtttcaggagcgtctgcaagaagatacgtcttttgggggcaacctcgggcgagcagtcttccaggccaagaagcgggttctcgaacctctcggtctggttgaggaaggcgctaagacggctcctggaaagaagagaccggtagagccatcaccccagcgttctccagactcctctacgggcatcggcaagaaaggccagcagcccgcgaaaaagagactcaactttgggcagactggcgactcagagtcagtgcccgaccctcaaccaatcggagaaccccccgcaggcccctctggtctgggatctggtacaatggctgcaggcggtggcgctccaatggcagacaataacgaaggcgccgacggagtgggtagttcctcaggaaattggcattgcgattccacatggctgggcgacagagtcatcaccaccagcacccgaacctgggccctccccacctacaacaaccacctctacaagcaaatctccaacgggacttcgggaggaagcaccaacgacaacacctacttcggctacagcaccccctgggggtattttgactttaacagattccactgccacttctcaccacgtgactggcagcgactcatcaacaacaactggggattccggcccaagagacccaacttcaagctcttcaacatccaggtcaaggaggtcacgcagaatgaaggcaccaagaccatcgccaataaccttaccagcacgattcaggtctttacggactcggaataccagctcccgtacgtcctcggctctgcgcaccagggctgcctgcctccgttcccggcggacgtcttcatgattcctcagtacgggtacctgactctgaacaatggcagtcaggccgtgggccgttcctccttctactgcctggagtactttccttctcaaatgctgagaacgggcaacaactttgagttcagctaccagtttgaggacgtgccttttcacagcagctacgcgcacagccaaagcctggaccggctgatgaaccccctcatcgaccagtacctgtactacctgtctcggactcagtccacgggaggtaccgcaggaactcagcagttgctattttctcaggccgggcctaataacatgtcggctcaggccaaaaactggctacccgggccctgctaccggcagcaacgcgtctccacgacactgtcgcaaaataacaacagcaactttgcctggaccggtgccaccaagtatcatctgaatggcagagactctctggtaaatcccggtgtcgctatggcaacccacaaggacgacgaagagcgattttttccgtccagcggagtcttaatgtttgggaaacagggagctggaaaagacaacgtggactatagcagcgttatgctaaccagtgaggaagaaattaaaaccaccaacccagtggccacagaacagtacggcgtggtggccgataacctgcaacagcaaaacgccgctcctattgtaggggccgtcaacagtcaaggagccttacctggcatggtctggcagaaccgggacgtgtacctgcagggtcctatctgggccaagattcctcacacggacggaaactttcatccctcgccgctgatgggaggctttggactgaaacacccgcctcctcagatcctgattaagaatacacctgttcccgcggatcctccaactaccttcagtcaagctaagctggcgtcgttcatcacgcagtacagcaccggacaggtcagcgtggaaattgaatgggagctgcagaaagaaaacagcaaacgctggaacccagagattcaatacacttccaactactacaaatctacaaatgtggactttgctgttaacacagatggcacttattctgagcctcgccccattggcacccgttacctcacccgtaatctgtaattgcttgttaatcaataaaccggttgattcgtttcagttgaactttggtctctgcgaagggcgaattc

SEQ ID NO: 113 - protein, 738 aa, Adeno-associated virus
MAADGYLPDWLEDNLSEGIREWWDLKPGAPKPKANQQKQDDGRGLVLPGYKYLGPFNGLDKGEPVNAADAAALEHDKAYDQQLKAGDNPYLRYNHADAEFQERLQEDTSFGGNLGRAVFQAKKRVLEPLGLVEEGAKTAPGKKRPVEPSPQRSPDSSTGIGKKGQQPAKKRLNFGQTGDSESVPDPQPIGEPPAGPSGLGSGTMAAGGGAPMADNNEGADGVGSSSGNWHCDSTWLGDRVITTSTRTWALPTYNNHLYKQISNGTSGGSTNDNTYFGYSTPWGYFDFNRFHCHFSPRDWQRLINNNWGFRPKRPNFKLFNIQVKEVTQNEGTKTIANNLTSTIQVFTDSEYQLPYVLGSAHQGCLPPFPADVFMIPQYGYLTLNNGSQAVGRSSFYCLEYFPSQMLRTGNNFEFSYQFEDVPFHSSYAHSQSLDRLMNPLIDQYLYYLSRTQSTGGTAGTQQLLFSQAGPNNMSAQAKNWLPGPCYRQQRVSTTLSQNNNSNFAWTGATKYHLNGRDSLVNPGVAMATHKDDEERFFPSSGVLMFGKQGAGKDNVDYSSVMLTSEEEIKTTNPVATEQYGVVADNLQQQNAAPIVGAVNSQGALPGMVWQNRDVYLQGPIWAKIPHTDGNFHPSPLMGGFGLKHPPPQILIKNTPVPADPPTTFSQAKLASFITQYSTGQVSVEIEWELQKENSKRWNPEIQYTSNYYKSTNVDFAVNTDGTYSEPRPIGTRYLTRNL

SEQ ID NO: 114 - protein, 738 aa, Adeno-associated virus
MAADGYLPDWLEDNLSEGIREWWDLKPGAPKPKANQQKQDDGRGLVLPGYKYLGPFNGLDKGEPVNAADAAALEHDKAYDQQLKAGDNPYLRYNHADAEFQERLQEDTSFGGNLGRAVFQAKKRVLEPLGLVEEAAKTAPGKKRPVEPSPQRSPDSSTGIGKKGQQPAKKRLNFGQTGDSESVPDPQPIGEPPAGPSGLGSGTMAAGGGAPMADNNEGADGVGSSSGNWHCDSTWLGDRVITTSTRTWALPTYNNHLYKQISNGTSGGSTNDNTYFGYSTPWGYFDFNRFHCHFSPRDWQRLINNNWGFRPKRLSFKLFNIQVKEVTQNEGTKTIANNLTSTIQVFTDSEYQLPYVLGSAHQGCLPPFPADVFMIPQYGYLTLNNGSQAVGRSSFYCLEYFPSQMLRTGNNFEFSYTFEDVPFHSSYAHSQSLDRLMNPLIDQYLYYLSRTQSTGGTQGTQQLLFSQAGPANMSAQAKNWLPGPCYRQQRVSTTLSQNNNSNFAWTGATKYHLNGRDSLVNPGVAMATHKDDEERFFPSSGVLMFGKQGAGRDNVDYSSVMLTSEEEIKTTNPVATEQYGVVADNLQQTNTGPIVGNVNSQGALPGMVWQNRDVYLQGPIWAKIPHTDGNFHPSPLMGGFGLKHPPPQILIKNTPVPADPPTTFSQAKLASFITQYSTGQVSVEIEWELQKENSKRWNPEIQYTSNYYKSTNVDFAVNTEGTYSEPRPIGTRYLTRNL

SEQ ID NO: 115 - DNA, 2172 bp, Artificial Sequence
  Description of Artificial Sequence: Synthetic polynucleotide
atgtcttttgttgatcaccctccagattggttggaagaagttggtgaaggtcttcgcgagtttttgggccttgaagcgggcccaccgaaaccaaaacccaatcagcagcatcaagatcaagcccgtggtcttgtgctgcctggttataactatctcggacccggaaacggtctcgatcgaggagagcctgtcaacagggcagacgaggtcgcgcgagagcacgacatctcgtacaacgagcagcttgaggcgggagacaacccctacctcaagtacaaccacgcggacgccgagtttcaggagaagctcgccgacgacacatccttcgggggaaacctcggaaaggcagtctttcaggccaagaaaagggttctcgaaccttttggcctggttgaagagggtgctaagacggcccctaccggaaagcggatagacgaccactttccaaaaagaaagaaggctcggaccgaagaggactccaagccttccacctcgtcagacgccgaagctggacccagcggatcccagcagctgcaaatcccagcccaaccagcctcaagtttgggagctgatacaatgtctgcgggaggtggcggcccattgggcgacaataaccaaggtgccgatggagtgggcaatgcctcgggagattggcattgcgattccacgtggatgggggacagagtcgtcaccaagtccacccgaacctgggtgctgcccagctacaacaaccaccagtaccgagagatcaaaagcggctccgtcgacggaagcaacgccaacgcctactttggatacagcaccccctgggggtactttgactttaaccgcttccacagccactggagcccccgagactggcaaagactcatcaacaactactggggcttcagaccccggtccctcagagtcaaaatcttcaacattcaagtcaaagaggtcacggtgcaggactccaccaccaccatcgccaacaacctcacctccaccgtccaagtgtttacggacgacgactaccagctgccctacgtcgtcggcaacgggaccgagggatgcctgccggccttccctccgcaggtctttacgctgccgcagtacggttacgcgacgctgaaccgcgacaacacagaaaatcccaccgagaggagcagcttcttctgcctagagtactttcccagcaagatgctgagaacgggcaacaactttgagtttacctacaactttgaggaggtgcccttccactccagcttcgctcccagtcagaacctgttcaagctggccaacccgctggtggaccagtacttgtaccgcttcgtgagcacaaataacactggcggagtccagttcaacaagaacctggccgggagatacgccaacacctacaaaaactggttcccggggcccatgggccgaacccagggctggaacctgggctccggggtcaaccgcgccagtgtcagcgccttcgccacgaccaataggatggagctcgagggcgcgagttaccaggtgcccccgcagccgaacggcatgaccaacaacctccagggcagcaacacctatgccctggagaacactatgatcttcaacagccagccggcgaacccgggcaccaccgccacgtacctcgagggcaacatgctcatcaccagcgagagcgagacgcagccggtgaaccgcgtggcgtacaacgtcggcgggcagatggccaccaacaaccagagctccaccactgcccccgcgaccggcacgtacaacctccaggaaatcgtgcccggcagcgtgtggatggagagggacgtgtacctccaaggacccatctgggccaagatcccagagacgggggcgcactttcacccctctccggccatgggcggattcggactcaaacacccaccgcccatgatgctcatcaagaacacgcctgtgcccggaaatatcaccagcttctcggacgtgcccgtcagcagcttcatcacccagtacagcaccgggcaggtcaccgtggagatggagtgggagctcaagaaggaaaactccaagaggtggaacccagagatccagtacacaaacaactacaacgacccccagtttgtggactttgccccggacagcaccggggaatacagaaccaccagacctatcggaacccgataccttacccgacccctt

SEQ ID NO: 116 - protein, 720 aa, Adeno-associated virus
MSFVDHPPDWLEEVGEGLREFLGLEAGPPKPKPNQQHQDQARGLVLPGYNYLGPGNGLDRGEPVNRADEVAREHDISYNEQLEAGDNPYLKYNHADAEFQEKLADDTSFGGNLGKAVFQAKKRVLEPFGLVEEGAKTAPTGKRIDDHFPKRKKARTEEDSKPSTSSDAEAGPSGSQQLQIPAQPASSLGADTMSAGGGGPLGDNNQGADGVGNASGDWHCDSTWMGDRVVTKSTRTWVLPSYNNHQYREIKSGSVDGSNANAYFGYSTPWGYFDFNRFHSHWSPRDWQRLINNYWGFRPRSLRVKIFNIQVKEVTVQDSTTTIANNLTSTVQVFTDDDYQLPYVVGNGTEGCLPAFPPQVFTLPQYGYATLNRDNTENPTERSSFFCLEYFPSKMLRTGNNFEFTYNFEEVPFHSSFAPSQNLFKLANPLVDQYLYRFVSTNNTGGVQFNKNLAGRYANTYKNWFPGPMGRTQGWNLGSGVNRASVSAFATTNRMELEGASYQVPPQPNGMTNNLQGSNTYALENTMIFNSQPANPGTTATYLEGNMLITSESETQPVNRVAYNVGGQMATNNQSSTTAPATGTYNLQEIVPGSVWMERDVYLQGPIWAKIPETGAHFHPSPAMGGFGLKHPPPMMLIKNTPVPGNITSFSDVPVSSFITQYSTGQVTVEMEWELKKENSKRWNPEIQYTNNYNDPQFVDFAPDSTGEYRTTRPIGTRYL

SEQ ID NO: 117 - protein, 724 aa, Adeno-associated virus 5
MSFVDHPPDWLEEVGEGLREFLGLEAGPPKPKPNQQHQDQARGLVLPGYNYLGPGNGLDRGEPVNRADEVAREHDISYNEQLEAGDNPYLKYNHADAEFQEKLADDTSFGGNLGKAVFQAKKRVLEPFGLVEEGAKTAPTGKRIDDHFPKRKKARTEEDSKPSTSSDAEAGPSGSQQLQIPAQPASSLGADTMSAGGGGPLGDNNQGADGVGNASGDWHCDSTWMGDRVVTKSTRTWVLPSYNNHQYREIKSGSVDGSNANAYFGYSTPWGYFDFNRFHSHWSPRDWQRLINNYWGFRPRSLRVKIFNIQVKEVTVQDSTTTIANNLTSTVQVFTDDDYQLPYVVGNGTEGCLPAFPPQVFTLPQYGYATLNRDNTENPTERSSFFCLEYFPSKMLRTGNNFEFTYNFEEVPFHSSFAPSQNLFKLANPLVDQYLYRFVSTNNTGGVQFNKNLAGRYANTYKNWFPGPMGRTQGWNLGSGVNRASVSAFATTNRMELEGASYQVPPQPNGMTNNLQGSNTYALENTMIFNSQPANPGTTATYLEGNMLITSESETQPVNRVAYNVGGQMATNNQSSTTAPATGTYNLQEIVPGSVWMERDVYLQGPIWAKIPETGAHFHPSPAMGGFGLKHPPPMMLIKNTPVPGNITSFSDVPVSSFITQYSTGQVTVEMEWELKKENSKRWNPEIQYTNNYNDPQFVDFAPDSTGEYRTTRPIGTRYLTRPL

SEQ ID NO: 118 - protein, 2175 aa, Adeno-associated virus 5
ATGTCTTTTGTTGATCACCCTCCAGATTGGTTGGAAGAAGTTGGTGAAGGTCTTCGCGAGTTTTTGGGCCTTGAAGCGGGCCCACCGAAACCAAAACCCAATCAGCAGCATCAAGATCAAGCCCGTGGTCTTGTGCTGCCTGGTTATAACTATCTCGGACCCGGAAACGGTCTCGATCGAGGAGAGCCTGTCAACAGGGCAGACGAGGTCGCGCGAGAGCACGACATCTCGTACAACGAGCAGCTTGAGGCGGGAGACAACCCCTACCTCAAGTACAACCACGCGGACGCCGAGTTTCAGGAGAAGCTCGCCGACGACACATCCTTCGGGGGAAACCTCGGAAAGGCAGTCTTTCAGGCCAAGAAAAGGGTTCTCGAACCTTTTGGCCTGGTTGAAGAGGGTGCTAAGACGGCCCCTACCGGAAAGCGGATAGACGACCACTTTCCAAAAAGAAAGAAGGCTCGGACCGAAGAGGACTCCAAGCCTTCCACCTCGTCAGACGCCGAAGCTGGACCCAGCGGATCCCAGCAGCTGCAAATCCCAGCCCAACCAGCCTCAAGTTTGGGAGCTGATACAATGTCTGCGGGAGGTGGCGGCCCATTGGGCGACAATAACCAAGGTGCCGATGGAGTGGGCAATGCCTCGGGAGATTGGCATTGCGATTCCACGTGGATGGGGGACAGAGTCGTCACCAAGTCCACCCGAACCTGGGTGCTGCCCAGCTACAACAACCACCAGTACCGAGAGATCAAAAGCGGCTCCGTCGACGGAAGCAACGCCAACGCCTACTTTGGATACAGCACCCCCTGGGGGTACTTTGACTTTAACCGCTTCCACAGCCACTGGAGCCCCCGAGACTGGCAAAGACTCATCAACAACTACTGGGGCTTCAGACCCCGGTCCCTCAGAGTCAAAATCTTCAACATTCAAGTCAAAGAGGTCACGGTGCAGGACTCCACCACCACCATCGCCAACAACCTCACCTCCACCGTCCAAGTGTTTACGGACGACGACTACCAGCTGCCCTACGTCGTCGGCAACGGGACCGAGGGATGCCTGCCGGCCTTCCCTCCGCAGGTCTTTACGCTGCCGCAGTACGGTTACGCGACGCTGAACCGCGACAACACAGAAAATCCCACCGAGAGGAGCAGCTTCTTCTGCCTAGAGTACTTTCCCAGCAAGATGCTGAGAACGGGCAACAACTTTGAGTTTACCTACAACTTTGAGGAGGTGCCCTTCCACTCCAGCTTCGCTCCCAGTCAGAACCTGTTCAAGCTGGCCAACCCGCTGGTGGACCAGTACTTGTACCGCTTCGTGAGCACAAATAACACTGGCGGAGTCCAGTTCAACAAGAACCTGGCCGGGAGATACGCCAACACCTACAAAAACTGGTTCCCGGGGCCCATGGGCCGAACCCAGGGCTGGAACCTGGGCTCCGGGGTCAACCGCGCCAGTGTCAGCGCCTTCGCCACGACCAATAGGATGGAGCTCGAGGGCGCGAGTTACCAGGTGCCCCCGCAGCCGAACGGCATGACCAACAACCTCCAGGGCAGCAACACCTATGCCCTGGAGAACACTATGATCTTCAACAGCCAGCCGGCGAACCCGGGCACCACCGCCACGTACCTCGAGGGCAACATGCTCATCACCAGCGAGAGCGAGACGCAGCCGGTGAACCGCGTGGCGTACAACGTCGGCGGGCAGATGGCCACCAACAACCAGAGCTCCACCACTGCCCCCGCGACCGGCACGTACAACCTCCAGGAAATCGTGCCCGGCAGCGTGTGGATGGAGAGGGACGTGTACCTCCAAGGACCCATCTGGGCCAAGATCCCAGAGACGGGGGCGCACTTTCACCCCTCTCCGGCCATGGGCGGATTCGGACTCAAACACCCACCGCCCATGATGCTCATCAAGAACACGCCTGTGCCCGGAAATATCACCAGCTTCTCGGACGTGCCCGTCAGCAGCTTCATCACCCAGTACAGCACCGGGCAGGTCACCGTGGAGATGGAGTGGGAGCTCAAGAAGGAAAACTCCAAGAGGTGGAACCCAGAGATCCAGTACACAAACAACTACAACGACCCCCAGTTTGTGGACTTTGCCCCGGACAGCACCGGGGAATACAGAACCACCAGACCTATCGGAACCCGATACCTTACCCGACCCCTTTAA

SEQ ID NO: 119 - DNA, 2208 bp, Adeno-associated virus 6
atggctgccgatggttatcttccagattggctcgaggacaacctctctgagggcattcgcgagtggtgggacttgaaacctggagccccgaaacccaaagccaaccagcaaaagcaggacgacggccggggtctggtgcttcctggctacaagtacctcggacccttcaacggactcgacaagggggagcccgtcaacgcggcggatgcagcggccctcgagcacgacaaggcctacgaccagcagctcaaagcgggtgacaatccgtacctgcggtataaccacgccgacgccgagtttcaggagcgtctgcaagaagatacgtcttttgggggcaacctcgggcgagcagtcttccaggccaagaagagggttctcgaaccttttggtctggttgaggaaggtgctaagacggctcctggaaagaaacgtccggtagagcagtcgccacaagagccagactcctcctcgggcattggcaagacaggccagcagcccgctaaaaagagactcaattttggtcagactggcgactcagagtcagtccccgacccacaacctctcggagaacctccagcaacccccgctgctgtgggacctactacaatggcttcaggcggtggcgcaccaatggcagacaataacgaaggcgccgacggagtgggtaatgcctcaggaaattggcattgcgattccacatggctgggcgacagagtcatcaccaccagcacccgaacatgggccttgcccacctataacaaccacctctacaagcaaatctccagtgcttcaacgggggccagcaacgacaaccactacttcggctacagcaccccctgggggtattttgatttcaacagattccactgccatttctcaccacgtgactggcagcgactcatcaacaacaattggggattccggcccaagagactcaacttcaagctcttcaacatccaagtcaaggaggtcacgacgaatgatggcgtcacgaccatcgctaataaccttaccagcacggttcaagtcttctcggactcggagtaccagttgccgtacgtcctcggctctgcgcaccagggctgcctccctccgttcccggcggacgtgttcatgattccgcagtacggctacctaacgctcaacaatggcagccaggcagtgggacggtcatccttttactgcctggaatatttcccatcgcagatgctgagaacgggcaataactttaccttcagctacaccttcgaggacgtgcctttccacagcagctacgcgcacagccagagcctggaccggctgatgaatcctctcatcgaccagtacctgtattacctgaacagaactcagaatcagtccggaagtgcccaaaacaaggacttgctgtttagccgggggtctccagctggcatgtctgttcagcccaaaaactggctacctggaccctgttaccggcagcagcgcgtttctaaaacaaaaacagacaacaacaacagcaactttacctggactggtgcttcaaaatataaccttaatgggcgtgaatctataatcaaccctggcactgctatggcctcacacaaagacgacaaagacaagttctttcccatgagcggtgtcatgatttttggaaaggagagcgccggagcttcaaacactgcattggacaatgtcatgatcacagacgaagaggaaatcaaagccactaaccccgtggccaccgaaagatttgggactgtggcagtcaatctccagagcagcagcacagaccctgcgaccggagatgtgcatgttatgggagccttacctggaatggtgtggcaagacagagacgtatacctgcagggtcctatttgggccaaaattcctcacacggatggacactttcacccgtctcctctcatgggcggctttggacttaagcacccgcctcctcagatcctcatcaaaaacacgcctgttcctgcgaatcctccggcagagttttcggctacaaagtttgcttcattcatcacccagtattccacaggacaagtgagcgtggagattgaatgggagctgcagaaagaaaacagcaaacgctggaatcccgaagtgcagtatacatctaactatgcaaaatctgccaacgttgatttcactgtggacaacaatggactttatactgagcctcgccccattggcacccgttacctcacccgtcccctg

SEQ ID NO: 120 - protein, 736 aa, Adeno-associated virus 6
MAADGYLPDWLEDNLSEGIREWWDLKPGAPKPKANQQKQDDGRGLVLPGYKYLGPFNGLDKGEPVNAADAAALEHDKAYDQQLKAGDNPYLRYNHADAEFQERLQEDTSFGGNLGRAVFQAKKRVLEPFGLVEEGAKTAPGKKRPVEQSPQEPDSSSGIGKTGQQPAKKRLNFGQTGDSESVPDPQPLGEPPATPAAVGPTTMASGGGAPMADNNEGADGVGNASGNWHCDSTWLGDRVITTSTRTWALPTYNNHLYKQISSASTGASNDNHYFGYSTPWGYFDFNRFHCHFSPRDWQRLINNNWGFRPKRLNFKLFNIQVKEVTTNDGVTTIANNLTSTVQVFSDSEYQLPYVLGSAHQGCLPPFPADVFMIPQYGYLTLNNGSQAVGRSSFYCLEYFPSQMLRTGNNFTFSYTFEDVPFHSSYAHSQSLDRLMNPLIDQYLYYLNRTQNQSGSAQNKDLLFSRGSPAGMSVQPKNWLPGPCYRQQRVSKTKTDNNNSNFTWTGASKYNLNGRESIINPGTAMASHKDDKDKFFPMSGVMIFGKESAGASNTALDNVMITDEEEIKATNPVATERFGTVAVNLQSSSTDPATGDVHVMGALPGMVWQDRDVYLQGPIWAKIPHTDGHFHPSPLMGGFGLKHPPPQILIKNTPVPANPPAEFSATKFASFITQYSTGQVSVEIEWELQKENSKRWNPEVQYTSNYAKSANVDFTVDNNGLYTEPRPIGTRYLTRPL

SEQ ID NO: 121 - protein, 623 aa, Adeno-associated virus 6
MPGFYEIVIKVPSDLDEHLPGISDSFVNWVAEKEWELPPDSDMDLNLIEQAPLTVAEKLQRDFLVQWRRVSKAPEALFFVQFEKGESYFHLHILVETTGVKSMVLGRFLSQIRDKLVQTIYRGIEPTLPNWFAVTKTRNGAGGGNKVVDECYIPNYLLPKTQPELQWAWTNMEEYISACLNLAERKRLVAHDLTHVSQTQEQNKENLNPNSDAPVIRSKTSARYMELVGWLVDRGITSEKQWIQEDQASYISFNAASNSRSQIKAALDNAGKIMALTKSAPDYLVGPAPPADIKTNRIYRILELNGYDPAYAGSVFLGWAQKRFGKRNTIWLFGPATTGKTNIAEAIAHAVPFYGCVNWTNENFPFNDCVDKMVIWWEEGKMTAKVVESAKAILGGSKVRVDQKCKSSAQIDPTPVIVTSNTNMCAVIDGNSTTFEHQQPLQDRMFKFELTRRLEHDFGKVTKQEVKEFFRWAQDHVTEVAHEFYVRKGGANKRPAPDDADKSEPKRACPSVADPSTSDAEGAPVDFADRYQNKCSRHAGMLQMLFPCKTCERMNQNFNICFTHGTRDCSECFPGVSESQPVVRKRTYRKLCAIHHLLGRAPEIACSACDLVNVDLDDCVSEQ

SEQ ID NO: 122 - DNA, 4683 bp, Adeno-associated virus 6
ttggccactccctctctgcgcgctcgctcgctcactgaggccgggcgaccaaaggtcgcccgacgcccgggctttgcccgggcggcctcagtgagcgagcgagcgcgcagagagggagtggccaactccatcactaggggttcctggaggggtggagtcgtgacgtgaattacgtcatagggttagggaggtcctgtattagaggtcacgtgagtgttttgcgacattttgcgacaccatgtggtcacgctgggtatttaagcccgagtgagcacgcagggtctccattttgaagcgggaggtttgaacgcgcagcgccatgccggggttttacgagattgtgattaaggtccccagcgaccttgacgagcatctgcccggcatttctgacagctttgtgaactgggtggccgagaaggaatgggagttgccgccagattctgacatggatctgaatctgattgagcaggcacccctgaccgtggccgagaagctgcagcgcgacttcctggtccagtggcgccgcgtgagtaaggccccggaggccctcttctttgttcagttcgagaagggcgagtcctacttccacctccatattctggtggagaccacgggggtcaaatccatggtgctgggccgcttcctgagtcagattagggacaagctggtgcagaccatctaccgcgggatcgagccgaccctgcccaactggttcgcggtgaccaagacgcgtaatggcgccggaggggggaacaaggtggtggacgagtgctacatccccaactacctcctgcccaagactcagcccgagctgcagtgggcgtggactaacatggaggagtatataagcgcgtgtttaaacctggccgagcgcaaacggctcgtggcgcacgacctgacccacgtcagccagacccaggagcagaacaaggagaatctgaaccccaattctgacgcgcctgtcatccggtcaaaaacctccgcacgctacatggagctggtcgggtggctggtggaccggggcatcacctccgagaagcagtggatccaggaggaccaggcctcgtacatctccttcaacgccgcctccaactcgcggtcccagatcaaggccgctctggacaatgccggcaagatcatggcgctgaccaaatccgcgcccgactacctggtaggccccgctccgcccgccgacattaaaaccaaccgcatttaccgcatcctggagctgaacggctacgaccctgcctacgccggctccgtctttctcggctgggcccagaaaaggttcggaaaacgcaacaccatctggctgtttgggccggccaccacgggcaagaccaacatcgcggaagccatcgcccacgccgtgcccttctacggctgcgtcaactggaccaatgagaactttcccttcaacgattgcgtcgacaagatggtgatctggtgggaggagggcaagatgacggccaaggtcgtggagtccgccaaggccattctcggcggcagcaaggtgcgcgtggaccaaaagtgcaagtcgtccgcccagatcgatcccacccccgtgatcgtcacctccaacaccaacatgtgcgccgtgattgacgggaacagcaccaccttcgagcaccagcagccgttgcaggaccggatgttcaaatttgaactcacccgccgtctggagcatgactttggcaaggtgacaaagcaggaagtcaaagagttcttccgctgggcgcaggatcacgtgaccgaggtggcgcatgagttctacgtcagaaagggtggagccaacaagagacccgcccccgatgacgcggataaaagcgagcccaagcgggcctgcccctcagtcgcggatccatcgacgtcagacgcggaaggagctccggtggactttgccgacaggtaccaaaacaaatgttctcgtcacgcgggcatgcttcagatgctgtttccctgcaaaacatgcgagagaatgaatcagaatttcaacatttgcttcacgcacgggaccagagactgttcagaatgtttccccggcgtgtcagaatctcaaccggtcgtcagaaagaggacgtatcggaaactctgtgccattcatcatctgctggggcgggctcccgagattgcttgctcggcctgcgatctggtcaacgtggatctggatgactgtgtttctgagcaataaatgacttaaaccaggtatggctgccgatggttatcttccagattggctcgaggacaacctctctgagggcattcgcgagtggtgggacttgaaacctggagccccgaaacccaaagccaaccagcaaaagcaggacgacggccggggtctggtgcttcctggctacaagtacctcggacccttcaacggactcgacaagggggagcccgtcaacgcggcggatgcagcggccctcgagcacgacaaggcctacgaccagcagctcaaagcgggtgacaatccgtacctgcggtataaccacgccgacgccgagtttcaggagcgtctgcaagaagatacgtcttttgggggcaacctcgggcgagcagtcttccaggccaagaagagggttctcgaaccttttggtctggttgaggaaggtgctaagacggctcctggaaagaaacgtccggtagagcagtcgccacaagagccagactcctcctcgggcattggcaagacaggccagcagcccgctaaaaagagactcaattttggtcagactggcgactcagagtcagtccccgacccacaacctctcggagaacctccagcaacccccgctgctgtgggacctactacaatggcttcaggcggtggcgcaccaatggcagacaataacgaaggcgccgacggagtgggtaatgcctcaggaaattggcattgcgattccacatggctgggcgacagagtcatcaccaccagcacccgaacatgggccttgcccacctataacaaccacctctacaagcaaatctccagtgcttcaacgggggccagcaacgacaaccactacttcggctacagcaccccctgggggtattttgatttcaacagattccactgccatttctcaccacgtgactggcagcgactcatcaacaacaattggggattccggcccaagagactcaacttcaagctcttcaacatccaagtcaaggaggtcacgacgaatgatggcgtcacgaccatcgctaataaccttaccagcacggttcaagtcttctcggactcggagtaccagttgccgtacgtcctcggctctgcgcaccagggctgcctccctccgttcccggcggacgtgttcatgattccgcagtacggctacctaacgctcaacaatggcagccaggcagtgggacggtcatccttttactgcctggaatatttcccatcgcagatgctgagaacgggcaataactttaccttcagctacaccttcgaggacgtgcctttccacagcagctacgcgcacagccagagcctggaccggctgatgaatcctctcatcgaccagtacctgtattacctgaacagaactcagaatcagtccggaagtgcccaaaacaaggacttgctgtttagccgggggtctccagctggcatgtctgttcagcccaaaaactggctacctggaccctgttaccggcagcagcgcgtttctaaaacaaaaacagacaacaacaacagcaactttacctggactggtgcttcaaaatataaccttaatgggcgtgaatctataatcaaccctggcactgctatggcctcacacaaagacgacaaagacaagttctttcccatgagcggtgtcatgatttttggaaaggagagcgccggagcttcaaacactgcattggacaatgtcatgatcacagacgaagaggaaatcaaagccactaaccccgtggccaccgaaagatttgggactgtggcagtcaatctccagagcagcagcacagaccctgcgaccggagatgtgcatgttatgggagccttacctggaatggtgtggcaagacagagacgtatacctgcagggtcctatttgggccaaaattcctcacacggatggacactttcacccgtctcctctcatgggcggctttggacttaagcacccgcctcctcagatcctcatcaaaaacacgcctgttcctgcgaatcctccggcagagttttcggctacaaagtttgcttcattcatcacccagtattccacaggacaagtgagcgtggagattgaatgggagctgcagaaagaaaacagcaaacgctggaatcccgaagtgcagtatacatctaactatgcaaaatctgccaacgttgatttcactgtggacaacaatggactttatactgagcctcgccccattggcacccgttacctcacccgtcccctgtaattgtgtgttaatcaataaaccggttaattcgtgtcagttgaactttggtctcatgtcgttattatcttatctggtcaccatagcaaccggttacacattaactgcttagttgcgcttcgcgaatacccctagtgatggagttgcccactccctctatgcgcgctcgctcgctcggtggggccggcagagcagagctctgccgtctgcggacctttggtccgcaggccccaccgagcgagcgagcgcgcatagagggagtgggcaa

SEQ ID NO: 123 - DNA, 2211 bp, Adeno-associated virus 6
atggctgccgatggttatcttccagattggctcgaggacaacctctctgagggcattcgcgagtggtgggacttgaaacctggagccccgaaacccaaagccaaccagcaaaagcaggacgacggccggggtctggtgcttcctggctacaagtacctcggacccttcaacggactcgacaagggggagcccgtcaacgcggcggatgcagcggccctcgagcacgacaaggcctacgaccagcagctcaaagcgggtgacaatccgtacctgcggtataaccacgccgacgccgagtttcaggagcgtctgcaagaagatacgtcttttgggggcaacctcgggcgagcagtcttccaggccaagaagagggttctcgaaccttttggtctggttgaggaaggtgctaagacggctcctggaaagaaacgtccggtagagcagtcgccacaagagccagactcctcctcgggcattggcaagacaggccagcagcccgctaaaaagagactcaattttggtcagactggcgactcagagtcagtccccgacccacaacctctcggagaacctccagcaacccccgctgctgtgggacctactacaatggcttcaggcggtggcgcaccaatggcagacaataacgaaggcgccgacggagtgggtaatgcctcaggaaattggcattgcgattccacatggctgggcgacagagtcatcaccaccagcacccgaacatgggccttgcccacctataacaaccacctctacaagcaaatctccagtgcttcaacgggggccagcaacgacaaccactacttcggctacagcaccccctgggggtattttgatttcaacagattccactgccatttctcaccacgtgactggcagcgactcatcaacaacaattggggattccggcccaagagactcaacttcaagctcttcaacatccaagtcaaggaggtcacgacgaatgatggcgtcacgaccatcgctaataaccttaccagcacggttcaagtcttctcggactcggagtaccagttgccgtacgtcctcggctctgcgcaccagggctgcctccctccgttcccggcggacgtgttcatgattccgcagtacggctacctaacgctcaacaatggcagccaggcagtgggacggtcatccttttactgcctggaatatttcccatcgcagatgctgagaacgggcaataactttaccttcagctacaccttcgaggacgtgcctttccacagcagctacgcgcacagccagagcctggaccggctgatgaatcctctcatcgaccagtacctgtattacctgaacagaactcagaatcagtccggaagtgcccaaaacaaggacttgctgtttagccgggggtctccagctggcatgtctgttcagcccaaaaactggctacctggaccctgttaccggcagcagcgcgtttctaaaacaaaaacagacaacaacaacagcaactttacctggactggtgcttcaaaatataaccttaatgggcgtgaatctataatcaaccctggcactgctatggcctcacacaaagacgacaaagacaagttctttcccatgagcggtgtcatgatttttggaaaggagagcgccggagcttcaaacactgcattggacaatgtcatgatcacagacgaagaggaaatcaaagccactaaccccgtggccaccgaaagatttgggactgtggcagtcaatctccagagcagcagcacagaccctgcgaccggagatgtgcatgttatgggagccttacctggaatggtgtggcaagacagagacgtatacctgcagggtcctatttgggccaaaattcctcacacggatggacactttcacccgtctcctctcatgggcggctttggacttaagcacccgcctcctcagatcctcatcaaaaacacgcctgttcctgcgaatcctccggcagagttttcggctacaaagtttgcttcattcatcacccagtattccacaggacaagtgagcgtggagattgaatgggagctgcagaaagaaaacagcaaacgctggaatcccgaagtgcagtatacatctaactatgcaaaatctgccaacgttgatttcactgtggacaacaatggactttatactgagcctcgccccattggcacccgttacctcacccgtcccctgtaa

SEQ ID NO: 124 - protein, 736 aa, Adeno-associated virus; identical to SEQ ID NO: 120

SEQ ID NO: 125 - protein, 736 aa, Adeno-associated virus
MAADGYLPDWLEDNLSEGIREWWDLKPGAPKPKANQQKQDDGRGLVLPGYKYLGPFNGLDKGEPVNAADAAALEHDKAYDQQLKAGDNPYLRYNHADAEFQERLQEDTSFGGNLGRAVFQAKKRVLEPFGLVEEGAKTAPGKKRPVEQSPQEPDSSSGIGKTGQQPAKKRLNFGQTGDSESVPDPQPLGEPPATPAAVGPTTMASGGGAPMADNNEGADGVGNASGNWHCDSTWLGDRVITTSTRTWALPTYNNHLYKQISSASTGASNDNHYFGYSTPWGYFDFNRFHCHFSPRDWQRLINNNWGFRPKRLNFKLFNIQVKEVTTNDGVTTIANNLTSTVQVFSDSEYQLPYVLGSAHQGCLPPFPADVFMIPQYGYLTLNNGSQAVGRSSFYCLEYFPSQMLRTGNNFTFSYTFEDVPFHSSYAHSQSLDRLMNPLIDQYLYYLNRTQNQSGSAQNKDLLFSRGSPAGMSVQPKNWLPGPCYRQQRVSKTKTDNNNSNFTWTGASKYNLNGRESIINPGTAMASHKDDEDKFFPMSGVMIFGKESAGASNTALDNVMITDEEEIKATNPVATERFGTVAVNLQSSSTDPATGDVHVMGALPGMVWQDRDVYLQGPIWAKIPHTDGHFHPSPLMGGFGLKHPPPQILIKNTPVPANPPAEFSATKFASFITQYSTGQVSVEIEWELQKENSKRWNPEVQYTSNYAKSANVDFTVDNNGLYTEPRPIGTRYLTRPL

SEQ ID NO: 126 - protein, 736 aa, Adeno-associated virus
MAADGYLPDWLEDNLSEGIREWWDLKPGAPKPKANQQKQDDGRGLVLPGYKYLGPFNGLDKGEPVNAADAAALEHDKAYDQQLKAGDNPYLRYNHADAEFQERLQEDTSFGGNLGRAVFQAKKRVLEPLGLVEEGAKTAPGKKRPVEQSPQEPDSSSGIGKTGQQPAKKRLNFGQTGDSESVPDPQPLGEPPATPAAVGPTTMASGGGAPMADNNEGADGVGNASGNWHCDSTWLGDRVITTSTRTWALPTYNNHLYKQISSASTGASNDNHYFGYSTPWGYFDFNRFHCHFSPRDWQRLINNNWGFRPKRLNFKLFNIQVKEVTTNDGVTTIANNLTSTVQVFSDSEYQLPYVLGSAHQGCLPPFPADVFMIPQYGYLTLNNGSQAVGRSSFYCLEYFPSQMLRTGNNFTFSYTFEDVPFHSSYAHSQSLDRLMNPLIDQYLYYLNRTQNQSGSAQNKDLLFSRGSPAGMSVQPKNWLPGPCYRQQRVSKTKTDNNNSNFTWTGASKYNLNGRESIINPGTAMASHKDDEDKFFPMSGVMIFGKESAGASNTALDNVMITDEEEIKATNPVATERFGTVAVNLQSSSTDPATGDVHVMGALPGMVWQDRDVYLQGPIWAKIPHTDGHFHPSPLMGGFGLKHPPPQILIKNTPVPANPPAEFSATKFASFITQYSTGQVSVEIEWELQKENSKRWNPEVQYTSNYAKSANVDFTVDNNGLYTEPRPIGTRYLTRPL

SEQ ID NO: 127 - protein, 736 aa, Adeno-associated virus
MAADGYLPDWLEDNLSEGIREWWDLKPGAPKPKANQQKQDDGRGLVLPGYKYLGPFNGLDKGEPVNAADAAALEHDKAYDQQLKAGDNPYLRYNHADAEFQERLQEDTSFGGNLGRAVFQAKKRVLEPLGLVEEGAKTAPGKKRPVEQSPQEPDSSSGIGKTGQQPAKKRLNFGQTGDSESVPDPQPLGEPPATPAAVGPTTMASGGGAPMADNNEGADGVGNASGNWHCDSTWLGDRVITTSTRTWALPTYNNHLYKQISSASTGASNDNHYFGYSTPWGYFDFNRFHCHFSPRDWQRLINNNWGFRPKRLNFKLFNIQVKEVTTNDGVTTIANNLTSTVQVFSDSEYQLPYVLGSAHQGCLPPFPADVFMIPQYGYLTLNNGSQAVGRSSFYCLEYFPSQMLRTGNNFTFSYTFEDVPFHSSYAHSQSLDRLMNPLIDQYLYYLNRTQNQSGSAQNKDLLFSRGSPAGMSVQPKNWLPGPCYRQQRVSKTKTDNNNSNFTWTGASKYNLNGRESIINPGTAMASHKDDKDKFFPMSGVMIFGKESAGASNTALDNVMITDEEEIKATNPVATERFGTVAVNLQSSSTDPATGDVHVMGALPGMVWQDRDVYLQGPIWAKIPHTDGHFHPSPLMGGFGLKHPPPQILIKNTPVPANPPAEFSATKFASFITQYSTGQVSVEIEWELQKENSKRWNPEVQYTSNYAKSANVDFTVDNNGLYTEPRPIGTRYLTRPL

SEQ ID NO: 128 - DNA, 2214 bp, Adeno-associated virus 7
atggctgccgatggttatcttccagattggctcgaggacaacctctctgagggcattcgcgagtggtgggacctgaaacctggagccccgaaacccaaagccaaccagcaaaagcaggacaacggccggggtctggtgcttcctggctacaagtacctcggacccttcaacggactcgacaagggggagcccgtcaacgcggcggacgcagcggccctcgagcacgacaaggcctacgaccagcagctcaaagcgggtgacaatccgtacctgcggtataaccacgccgacgccgagtttcaggagcgtctgcaagaagatacgtcatttgggggcaacctcgggcgagcagtcttccaggccaagaagcgggttctcgaacctctcggtctggttgaggaaggcgctaagacggctcctgcaaagaagagaccggtagagccgtcacctcagcgttcccccgactcctccacgggcatcggcaagaaaggccagcagcccgccagaaagagactcaatttcggtcagactggcgactcagagtcagtccccgaccctcaacctctcggagaacctccagcagcgccctctagtgtgggatctggtacagtggctgcaggcggtggcgcaccaatggcagacaataacgaaggtgccgacggagtgggtaatgcctcaggaaattggcattgcgattccacatggctgggcgacagagtcattaccaccagcacccgaacctgggccctgcccacctacaacaaccacctctacaagcaaatctccagtgaaactgcaggtagtaccaacgacaacacctacttcggctacagcaccccctgggggtattttgactttaacagattccactgccacttctcaccacgtgactggcagcgactcatcaacaacaactggggattccggcccaagaagctgcggttcaagctcttcaacatccaggtcaaggaggtcacgacgaatgacggcgttacgaccatcgctaataaccttaccagcacgattcaggtattctcggactcggaataccagctgccgtacgtcctcggctctgcgcaccagggctgcctgcctccgttcccggcggacgtcttcatgattcctcagtacggctacctgactctcaacaatggcagtcagtctgtgggacgttcctccttctactgcctggagtacttcccctctcagatgctgagaacgggcaacaactttgagttcagctacagcttcgaggacgtgcctttccacagcagctacgcacacagccagagcctggaccggctgatgaatcccctcatcgaccagtacttgtactacctggccagaacacagagtaacccaggaggcacagctggcaatcgggaactgcagttttaccagggcgggccttcaactatggccgaacaagccaagaattggttacctggaccttgcttccggcaacaaagagtctccaaaacgctggatcaaaacaacaacagcaactttgcttggactggtgccaccaaatatcacctgaacggcagaaactcgttggttaatcccggcgtcgccatggcaactcacaaggacgacgaggaccgctttttcccatccagcggagtcctgatttttggaaaaactggagcaactaacaaaactacattggaaaatgtgttaatgacaaatgaagaagaaattcgtcctactaatcctgtagccacggaagaatacgggatagtcagcagcaacttacaagcggctaatactgcagcccagacacaagttgtcaacaaccagggagccttacctggcatggtctggcagaaccgggacgtgtacctgcagggtcccatctgggccaagattcctcacacggatggcaactttcacccgtctcctttgatgggcggctttggacttaaacatccgcctcctcagatcctgatcaagaacactcccgttcccgctaatcctccggaggtgtttactcctgccaagtttgcttcgttcatcacacagtacagcaccggacaagtcagcgtggaaatcgagtgggagctgcagaaggaaaacagcaagcgctggaacccggagattcagtacacctccaactttgaaaagcagactggtgtggactttgccgttgacagccagggtgtttactctgagcctcgccctattggcactcgttacctcacccgtaatctgtaa

SEQ ID NO: 129 - protein, 738 aa, Adeno-associated virus 7
MAADGYLPDWLEDNLSEGIREWWALKPGAPKPKANQQKQDDGRGLVLPGYKYLGPFNGLDKGEPVNAADAAALEHDKAYDQQLQAGDNPYLRYNHADAEFQERLQEDTSFGGNLGRAVFQAKKRVLEPLGLVEEGAKTAPGKKRPVEPSPQRSPDSSTGIGKKGQQPARKRLNFGQTGDSESVPDPQPLGEPPAAPSGVGPNTMAAGGGAPMADNNEGADGVGSSSGNWHCDSTWLGDRVITTSTRTWALPTYNNHLYKQISNGTSGGATNDNTYFGYSTPWGYFDFNRFHCHFSPRDWQRLINNNWGFRPKRLSFKLFNIQVKEVTQNEGTKTIANNLTSTIQVFTDSEYQLPYVLGSAHQGCLPPFPADVFMIPQYGYLTLNNGSQAVGRSSFYCLEYFPSQMLRTGNNFQFTYTFEDVPFHSSYAHSQSLDRLMNPLIDQYLYYLSRTQTTGGTANTQTLGFSQGGPNTMANQAKNWLPGPCYRQQRVSTTTGQNNNSNFAWTAGTKYHLNGRNSLANPGIAMATHKDDEERFFPSNGILIFGKQNAARDNADYSDVMLTSEEEIKTTNPVATEEYGIVADNLQQQNTAPQIGTVNSQGALPGMVWQNRDVYLQGPIWAKIPHTDGNFHPSPLMGGFGLKHPPPQILIKNTPVPADPPTTFNQSKLNSFITQYSTGQVSVEIEWELQKENSKRWNPEIQYTSNYYKSTSVDFAVNTEGVYSEPRPIGTRYLTRNL

SEQ ID NO: 130 - protein, 737 aa, Adeno-associated virus 7
MAADGYLPDWLEDNLSEGIREWWDLKPGAPKPKANQQKQDNGRGLVLPGYKYLGPFNGLDKGEPVNAADAAALEHDKAYDQQLKAGDNPYLRYNHADAEFQERLQEDTSFGGNLGRAVFQAKKRVLEPLGLVEEGAKTAPAKKRPVEPSPQRSPDSSTGIGKKGQQPARKRLNFGQTGDSESVPDPQPLGEPPAAPSSVGSGTVAAGGGAPMADNNEGADGVGNASGNWHCDSTWLGDRVITTSTRTWALPTYNNHLYKQISSETAGSTNDNTYFGYSTPWGYFDFNRFHCHFSPRDWQRLINNNWGFRPKKLRFKLFNIQVKEVTTNDGVTTIANNLTSTIQVFSDSEYQLPYVLGSAHQGCLPPFPADVFMIPQYGYLTLNNGSQSVGRSSFYCLEYFPSQMLRTGNNFEFSYSFEDVPFHSSYAHSQSLDRLMNPLIDQYLYYLARTQSNPGGTAGNRELQFYQGGPSTMAEQAKNWLPGPCFRQQRVSKTLDQNNNSNFAWTGATKYHLNGRNSLVNPGVAMATHKDDEDRFFPSSGVLIFGKTGATNKTTLENVLMTNEEEIRPTNPVATEEYGIVSSNLQAANTAAQTQVVNNQGALPGMVWQNRDVYLQGPIWAKIPHTDGNFHPSPLMGGFGLKHPPPQILIKNTPVPANPPEVFTPAKFASFITQYSTGQVSVEIEWELQKENSKRWNPEIQYTSNFEKQTGVDFAVDSQGVYSEPRPIGTRYLTRNL

SEQ ID NO: 131 - protein, 623 aa, Adeno-associated virus 7
MPGFYEIVIKVPSDLDEHLPGISDSFVNWVAEKEWELPPDSDMDLNLIEQAPLTVAEKLQRDFLVQWRRVSKAPEALFFVQFEKGESYFHLHVLVETTGVKSMVLGRFLSQIREKLVQTIYRGVEPTLPNWFAVTKTRNGAGGGNKVVDECYIPNYLLPKTQPELQWAWTNMEEYISACLNLAERKRLVAQHLTHVSQTQEQNKENLNPNSDAPVIRSKTSARYMELVGWLVDRGITSEKQWIQEDQASYISFNAASNSRSQIKAALDNAGKIMALTKSAPDYLVGPSLPADIKTNRIYRILELNGYDPAYAGSVFLGWAQKKFGKRNTIWLFGPATTGKTNIAEAIAHAVPFYGCVNWTNENFPFNDCVDKMVIWWEEGKMTAKVVESAKAILGGSKVRVDQKCKSSAQIDPTPVIVTSNTNMCAVIDGNSTTFEHQQPLQDRMFKFELTRRLEHDFGKVTKQEVKEFFRWASDHVTEVAHEFYVRKGGASKRPAPDDADISEPKRACPSVADPSTSDAEGAPVDFADRYQNKCSRHAGMIQMLFPCKTCERMNQNFNICFTHGVRDCLECFPGVSESQPVVRKKTYRKLCAIHHLLGRAPEIACSACDLVNVDLDDCVSEQ

SEQ ID NO: 132 - DNA, 4721 bp, Adeno-associated virus 7
ttggccactccctctatgcgcgctcgctcgctcggtggggcctgcggaccaaaggtccgcagacggcagagctctgctctgccggccccaccgagcgagcgagcgcgcatagagggagtggccaactccatcactaggggtaccgcgaagcgcctcccacgctgccgcgtcagcgctgacgtaaatcacgtcataggggagtggtcctgtattagctgtcacgtgagtgcttttgcgacattttgcgacaccacgtggccatttgaggtatatatggccgagtgagcgagcaggatctccattttgaccgcgaaatttgaacgagcagcagccatgccgggtttctacgagatcgtgatcaaggtgccgagcgacctggacgagcacctgccgggcatttctgactcgtttgtgaactgggtggccgagaaggaatgggagctgcccccggattctgacatggatctgaatctgatcgagcaggcacccctgaccgtggccgagaagctgcagcgcgacttcctggtccaatggcgccgcgtgagtaaggccccggaggccctgttctttgttcagttcgagaagggcgagagctacttccaccttcacgttctggtggagaccacgggggtcaagtccatggtgctaggccgcttcctgagtcagattcgggagaagctggtccagaccatctaccgcggggtcgagcccacgctgcccaactggttcgcggtgaccaagacgcgtaatggcgccggcggggggaacaaggtggtggacgagtgctacatccccaactacctcctgcccaagacccagcccgagctgcagtgggcgtggactaacatggaggagtatataagcgcgtgtttgaacctggccgaacgcaaacggctcgtggcgcagcacctgacccacgtcagccagacgcaggagcagaacaaggagaatctgaaccccaattctgacgcgcccgtgatcaggtcaaaaacctccgcgcgctacatggagctggtcgggtggctggtggaccggggcatcacctccgagaagcagtggatccaggaggaccaggcctcgtacatctccttcaacgccgcctccaactcgcggtcccagatcaaggccgcgctggacaatgccggcaagatcatggcgctgaccaaatccgcgcccgactacctggtggggccctcgctgcccgcggacattaaaaccaaccgcatctaccgcatcctggagctgaacgggtacgatcctgcctacgccggctccgtctttctcggctgggcccagaaaaagttcgggaagcgcaacaccatctggctgtttgggcccgccaccaccggcaagaccaacattgcggaagccatcgcccacgccgtgcccttctacggctgcgtcaactggaccaatgagaactttcccttcaacgattgcgtcgacaagatggtgatctggtgggaggagggcaagatgacggccaaggtcgtggagtccgccaaggccattctcggcggcagcaaggtgcgcgtggaccaaaagtgcaagtcgtccgcccagatcgaccccacccccgtgatcgtcacctccaacaccaacatgtgcgccgtgattgacgggaacagcaccaccttcgagcaccagcagccgttgcaggaccggatgttcaaatttgaactcacccgccgtctggagcacgactttggcaaggtgacgaagcaggaagtcaaagagttcttccgctgggccagtgatcacgtgaccgaggtggcgcatgagttctacgtcagaaagggcggagccagcaaaagacccgcccccgatgacgcggatataagcgagcccaagcgggcctgcccctcagtcgcggatccatcgacgtcagacgcggaaggagctccggtggactttgccgacaggtaccaaaacaaatgttctcgtcacgcgggcatgattcagatgctgtttccctgcaaaacgtgcgagagaatgaatcagaatttcaacatttgcttcacacacggggtcagagactgtttagagtgtttccccggcgtgtcagaatctcaaccggtcgtcagaaaaaagacgtatcggaaactctgcgcgattcatcatctgctggggcgggcgcccgagattgcttgctcggcctgcgacctggtcaacgtggacctggacgactgcgtttctgagcaataaatgacttaaaccaggtatggctgccgatggttatcttccagattggctcgaggacaacctctctgagggcattcgcgagtggtgggacctgaaacctggagccccgaaacccaaagccaaccagcaaaagcaggacaacggccggggtctggtgcttcctggctacaagtacctcggacccttcaacggactcgacaagggggagcccgtcaacgcggcggacgcagcggccctcgagcacgacaaggcctacgaccagcagctcaaagcgggtgacaatccgtacctgcggtataaccacgccgacgccgagtttcaggagcgtctgcaagaagatacgtcatttgggggcaacctcgggcgagcagtcttccaggccaagaagcgggttctcgaacctctcggtctggttgaggaaggcgctaagacggctcctgcaaagaagagaccggtagagccgtcacctcagcgttcccccgactcctccacgggcatcggcaagaaaggccagcagcccgccagaaagagactcaatttcggtcagactggcgactcagagtcagtccccgaccctcaacctctcggagaacctccagcagcgccctctagtgtgggatctggtacagtggctgcaggcggtggcgcaccaatggcagacaataacgaaggtgccgacggagtgggtaatgcctcaggaaattggcattgcgattccacatggctgggcgacagagtcattaccaccagcacccgaacctgggccctgcccacctacaacaaccacctctacaagcaaatctccagtgaaactgcaggtagtaccaacgacaacacctacttcggctacagcaccccctgggggtattttgactttaacagattccactgccacttctcaccacgtgactggcagcgactcatcaacaacaactggggattccggcccaagaagctgcggttcaagctcttcaacatccaggtcaaggaggtcacgacgaatgacggcgttacgaccatcgctaataaccttaccagcacgattcaggtattctcggactcggaataccagctgccgtacgtcctcggctctgcgcaccagggctgcctgcctccgttcccggcggacgtcttcatgattcctcagtacggctacctgactctcaacaatggcagtcagtctgtgggacgttcctccttctactgcctggagtacttcccctctcagatgctgagaacgggcaacaactttgagttcagctacagcttcgaggacgtgcctttccacagcagctacgcacacagccagagcctggaccggctgatgaatcccctcatcgaccagtacttgtactacctggccagaacacagagtaacccaggaggcacagctggcaatcgggaactgcagttttaccagggcgggccttcaactatggccgaacaagccaagaattggttacctggaccttgcttccggcaacaaagagtctccaaaacgctggatcaaaacaacaacagcaactttgcttggactggtgccaccaaatatcacctgaacggcagaaactcgttggttaatcccggcgtcgccatggcaactcacaaggacgacgaggaccgctttttcccatccagcggagtcctgatttttggaaaaactggagcaactaacaaaactacattggaaaatgtgttaatgacaaatgaagaagaaattcgtcctactaatcctgtagccacggaagaatacgggatagtcagcagcaacttacaagcggctaatactgcagcccagacacaagttgtcaacaaccagggagccttacctggcatggtctggcagaaccgggacgtgtacctgcagggtcccatctgggccaagattcctcacacggatggcaactttcacccgtctcctttgatgggcggctttggacttaaacatccgcctcctcagatcctgatcaagaacactcccgttcccgctaatcctccggaggtgtttactcctgccaagtttgcttcgttcatcacacagtacagcaccggacaagtcagcgtggaaatcgagtgggagctgcagaaggaaaacagcaagcgctggaacccggagattcagtacacctccaactttgaaaagcagactggtgtggactttgccgttgacagccagggtgtttactctgagcctcgccctattggcactcgttacctcacccgtaatctgtaattgcatgttaatcaataaaccggttgattcgtttcagttgaactttggtctcctgtgcttcttatcttatcggtttccatagcaactggttacacattaactgcttgggtgcgcttcacgataagaacactgacgtcaccgcggtacccctagtgatggagttggccactccctctatgcgcgctcgctcgctcggtggggcctgcggaccaaaggtccgcagacggcagagctctgctctgccggccccaccgagcgagcgagcgcgcatagagggagtggccaa

SEQ ID NO: 133 - DNA, 2214 bp, Adeno-associated virus 7; identical to SEQ ID NO: 128

SEQ ID NO: 134 - protein, 737 aa, Adeno-associated virus 7; identical to SEQ ID NO: 130

SEQ ID NO: 135 - DNA, 2217 bp, Adeno-associated virus 8
atggctgccgatggttatcttccagattggctcgaggacaacctctctgagggcattcgcgagtggtgggcgctgaaacctggagccccgaagcccaaagccaaccagcaaaagcaggacgacggccggggtctggtgcttcctggctacaagtacctcggacccttcaacggactcgacaagggggagcccgtcaacgcggcggacgcagcggccctcgagcacgacaaggcctacgaccagcagctgcaggcgggtgacaatccgtacctgcggtataaccacgccgacgccgagtttcaggagcgtctgcaagaagatacgtcttttgggggcaacctcgggcgagcagtcttccaggccaagaagcgggttctcgaacctctcggtctggttgaggaaggcgctaagacggctcctggaaagaagagaccggtagagccatcaccccagcgttctccagactcctctacgggcatcggcaagaaaggccaacagcccgccagaaaaagactcaattttggtcagactggcgactcagagtcagttccagaccctcaacctctcggagaacctccagcagcgccctctggtgtgggacctaatacaatggctgcaggcggtggcgcaccaatggcagacaataacgaaggcgccgacggagtgggtagttcctcgggaaattggcattgcgattccacatggctgggcgacagagtcatcaccaccagcacccgaacctgggccctgcccacctacaacaaccacctctacaagcaaatctccaacgggacatcgggaggagccaccaacgacaacacctacttcggctacagcaccccctgggggtattttgactttaacagattccactgccacttttcaccacgtgactggcagcgactcatcaacaacaactggggattccggcccaagagactcagcttcaagctcttcaacatccaggtcaaggaggtcacgcagaatgaaggcaccaagaccatcgccaataacctcaccagcaccatccaggtgtttacggactcggagtaccagctgccgtacgttctcggctctgcccaccagggctgcctgcctccgttcccggcggacgtgttcatgattccccagtacggctacctaacactcaacaacggtagtcaggccgtgggacgctcctccttctactgcctggaatactttccttcgcagatgctgagaaccggcaacaacttccagtttacttacaccttcgaggacgtgcctttccacagcagctacgcccacagccagagcttggaccggctgatgaatcctctgattgaccagtacctgtactacttgtctcggactcaaacaacaggaggcacggcaaatacgcagactctgggcttcagccaaggtgggcctaatacaatggccaatcaggcaaagaactggctgccaggaccctgttaccgccaacaacgcgtctcaacgacaaccgggcaaaacaacaatagcaactttgcctggactgctgggaccaaataccatctgaatggaagaaattcattggctaatcctggcatcgctatggcaacacacaaagacgacgaggagcgtttttttcccagtaacgggatcctgatttttggcaaacaaaatgctgccagagacaatgcggattacagcgatgtcatgctcaccagcgaggaagaaatcaaaaccactaaccctgtggctacagaggaatacggtatcgtggcagataacttgcagcagcaaaacacggctcctcaaattggaactgtcaacagccagggggccttacccggtatggtctggcagaaccgggacgtgtacctgcagggtcccatctgggccaagattcctcacacggacggcaacttccacccgtctccgctgatgggcggctttggcctgaaacatcctccgcctcagatcctgatcaagaacacgcctgtacctgcggatcctccgaccaccttcaaccagtcaaagctgaactctttcatcacgcaatacagcaccggacaggtcagcgtggaaattgaatgggagctgcagaaggaaaacagcaagcgctggaaccccgagatccagtacacctccaactactacaaatctacaagtgtggactttgctgttaatacagaaggcgtgtactctgaaccccgccccattggcacccgttacctcacccgtaatctgtaa

SEQ ID NO: 136 - DNA, 2213 bp, Adeno-associated virus 8
atggctgccgatggttatcttccagattggctcgaggacaacctctctgagggcattcgcgagtggtgggcgctgaaacctggagccccgaagcccaaagccaaccagcaaaagcaggacgacggccggggtctggtgcttcctggctacaagtacctcggacccttcaacggactcgacaagggggagcccgtcaacgcggcggacgcagcggccctcgagcacgacaaggcctacgaccagcagctgcaggcgggtgacaatccgtacctgcggtataaccacgccgacgccgagtttcaggagcgtctgcaagaagatacgtcttttgggggcaacctcgggcgagcagtcttccaggccaagaagcgggttctcgaacctctcggtctggttgaggaaggcgctaagacggctcctggaaagaagagaccggtagagccatcaccccagcgttctccagactcctctacgggcatcggcaagaaaggccaacagcccgccagaaaaagactcaattttggtcagactggcgactcagagtcagttccagaccctcaacctctcggagaacctccagcagcgccctctggtgtgggacctaatacaatggctgcaggcggtggcgcaccaatggcagacaataacgaaggcgccgacggagtgggtagttcctcgggaaattggcattgcgattccacatggctgggcgacagagtcatcaccaccagcacccgaacctgggccctgcccacctacaacaaccacctctacaagcaaatctccaacgggacatcgggaggagccaccaacgacaacacctacttcggctacagcaccccctgggggtattttgactttaacagattccactgccacttttcaccacgtgactggcagcgactcatcaacaacaactggggattccggcccaagagactcagcttcaagctcttcaacatccaggtcaaggaggtcacgcagaatgaaggcaccaagaccatcgccaataacctcaccagcaccatccaggtgtttacggactcggagtaccagctgccgtacgttctcggctctgcccaccagggctgcctgcctccgttcccggcggacgtgttcatgattccccagtacggctacctaacactcaacaacggtagtcaggccgtgggacgctcctccttctactgcctggaatactttccttcgcagatgctgagaaccggcaacaacttccagtttacttacaccttcgaggacgtgcctttccacagcagctacgcccacagccagagcttggaccggctgatgaatcctctgattgaccagtacctgtactacttgtctcggactcaaacaacaggaggcacggcaaatacgcagactctgggcttcagccaaggtgggcctaatacaatggccaatcaggcaaagaactggctgccaggaccctgttaccgccaacaacgcgtctcaacgacaaccgggcaaaacaacaatagcaactttgcctggactgctgggaccaaataccatctgaatggaagaaattcattggctaatcctggcatcgctatggcaacacacaaagacgacgaggagcgtttttttcccagtaacgggatcctgatttttggcaaacaaaatgctgccagagacaatgcggattacagcgatgtcatgctcaccagcgaggaagaaatcaaaaccactaaccctgtggctacagaggaatacggtatcgtggcagataacttgcagcagcaaaacacggctcctcaaattggaactgtcaacagccagggggccttacccggtatggtctggcagaaccgggacgtgtacctgcagggtcccatctgggccaagattcctcacacggacggcaacttccacccgtctccgctgatgggcggctttggcctgaaacatcctccgcctcagatcctgatcaagaacacgcctgtacctgcggatcctccgaccaccttcaaccagtcaaagctgaactctttcatcacgcaatacagcaccggacaggtcagcgtggaaattgaatgggagctgcagaaggaaaacagcaagcgctggaaccccgagatccagtacacctccaactactacaaatctacaagtgtggactttgctgtaatacagaaggcgtgtactctgaaccccgccccattggcacccgttacctcacccgtaatctg

SEQ ID NO: 137 - DNA, 4393 bp, Adeno-associated virus 8
cagagagggagtggccaactccatcactaggggtagcgcgaagcgcctcccacgctgccgcgtcagcgctgacgtaaattacgtcataggggagtggtcctgtattagctgtcacgtgagtgcttttgcggcattttgcgacaccacgtggccatttgaggtatatatggccgagtgagcgagcaggatctccattttgaccgcgaaatttgaacgagcagcagccatgccgggcttctacgagatcgtgatcaaggtgccgagcgacctggacgagcacctgccgggcatttctgactcgtttgtgaactgggtggccgagaaggaatgggagctgcccccggattctgacatggatcggaatctgatcgagcaggcacccctgaccgtggccgagaagctgcagcgcgacttcctggtccaatggcgccgcgtgagtaaggccccggaggccctcttctttgttcagttcgagaagggcgagagctactttcacctgcacgttctggtcgagaccacgggggtcaagtccatggtgctaggccgcttcctgagtcagattcgggaaaagcttggtccagaccatctacccgcggggtcgagccccaccttgcccaactggttcgcggtgaccaaagacgcggtaatggcgccggcgggggggaacaaggtggtggacgagtgctacatccccaactacctcctgcccaagactcagcccgagctgcagtgggcgtggactaacatggaggagtatataagcgcgtgcttgaacctggccgagcgcaaacggctcgtggcgcagcacctgacccacgtcagccagacgcaggagcagaacaaggagaatctgaaccccaattctgacgcgcccgtgatcaggtcaaaaacctccgcgcgctatatggagctggtcgggtggctggtggaccggggcatcacctccgagaagcagtggatccaggaggaccaggcctcgtacatctccttcaacgccgcctccaactcgcggtcccagatcaaggccgcgctggacaatgccggcaagatcatggcgctgaccaaatccgcgcccgactacctggtggggccctcgctgcccgcggacattacccagaaccgcatctaccgcatcctcgctctcaacggctacgaccctgcctacgccggctccgtctttctcggctgggctcagaaaaagttcgggaaacgcaacaccatctggctgtttggacccgccaccaccggcaagaccaacattgcggaagccatcgcccacgccgtgcccttctacggctgcgtcaactggaccaatgagaactttcccttcaatgattgcgtcgacaagatggtgatctggtgggaggagggcaagatgacggccaaggtcgtggagtccgccaaggccattctcggcggcagcaaggtgcgcgtggaccaaaagtgcaagtcgtccgcccagatcgaccccacccccgtgatcgtcacctccaacaccaacatgtgcgccgtgattgacgggaacagcaccaccttcgagcaccagcagcctctccaggaccggatgtttaagttcgaactcacccgccgtctggagcacgactttggcaaggtgacaaagcaggaagtcaaagagttcttccgctgggccagtgatcacgtgaccgaggtggcgcatgagttttacgtcagaaagggcggagccagcaaaagacccgcccccgatgacgcggataaaagcgagcccaagcgggcctgcccctcagtcgcggatccatcgacgtcagacgcggaaggagctccggtggactttgccgacaggtaccaaaacaaatgttctcgtcacgcgggcatgcttcagatgctgtttccctgcaaaacgtgcgagagaatgaatcagaatttcaacatttgcttcacacacggggtcagagactgctcagagtgtttccccggcgtgtcagaatctcaaccggtcgtcagaaagaggacgtatcggaaactctgtgcgattcatcatctgctggggcgggctcccgagattgcttgctcggcctgcgatctggtcaacgtggacctggatgactgtgtttctgagcaataaatgacttaaaccaggtatggctgccgatggttatcttccagattggctcgaggacaacctctctgagggcattcgcgagtggtgggcgctgaaacctggagccccgaagcccaaagccaaccagcaaaagcaggacgacggccggggtctggtgcttcctggctacaagtacctcggacccttcaacggactcgacaagggggagcccgtcaacgcggcggacgcagcggccctcgagcacgacaaggcctacgaccagcagctgcaggcgggtgacaatccgtacctgcggtataaccacgccgacgccgagtttcaggagcgtctgcaagaagatacgtcttttgggggcaacctcgggcgagcagtcttccaggccaagaagcgggttctcgaacctctcggtctggttgaggaaggcgctaagacggctcctggaaagaagagaccggtagagccatcaccccagcgttctccagactcctctacgggcatcggcaagaaaggccaacagcccgccagaaaaagactcaattttggtcagactggcgactcagagtcagttccagaccctcaacctctcggagaacctccagcagcgccctctggtgtgggacctaatacaatggctgcaggcggtggcgcaccaatggcagacaataacgaaggcgccgacggagtgggtagttcctcgggaaattggcattgcgattccacatggctgggcgacagagtcatcaccaccagcacccgaacctgggccctgcccacctacaacaaccacctctacaagcaaatctccaacgggacatcgggaggagccaccaacgacaacacctacttcggctacagcaccccctgggggtattttgactttaacagattccactgccacttttcaccacgtgactggcagcgactcatcaacaacaactggggattccggcccaagagactcagcttcaagctcttcaacatccaggtcaaggaggtcacgcagaatgaaggcaccaagaccatcgccaataacctcaccagcaccatccaggtgtttacggactcggagtaccagctgccgtacgttctcggctctgcccaccagggctgcctgcctccgttcccggcggacgtgttcatgattccccagtacggctacctaacactcaacaacggtagtcaggccgtgggacgctcctccttctactgcctggaatactttccttcgcagatgctgagaaccggcaacaacttccagtttacttacaccttcgaggacgtgcctttccacagcagctacgcccacagccagagcttggaccggctgatgaatcctctgattgaccagtacctgtactacttgtctcggactcaaacaacaggaggcacggcaaatacgcagactctgggcttcagccaaggtgggcctaatacaatggccaatcaggcaaagaactggctgccaggaccctgttaccgccaacaacgcgtctcaacgacaaccgggcaaaacaacaatagcaactttgcctggactgctgggaccaaataccatctgaatggaagaaattcattggctaatcctggcatcgctatggcaacacacaaagacgacgaggagcgtttttttcccagtaacgggatcctgatttttggcaaacaaaatgctgccagagacaatgcggattacagcgatgtcatgctcaccagcgaggaagaaatcaaaaccactaaccctgtggctacagaggaatacggtatcgtggcagataacttgcagcagcaaaacacggctcctcaaattggaactgtcaacagccagggggccttacccggtatggtctggcagaaccgggacgtgtacctgcagggtcccatctgggccaagattcctcacacggacggcaacttccacccgtctccgctgatgggcggctttggcctgaaacatcctccgcctcagatcctgatcaagaacacgcctgtacctgcggatcctccgaccaccttcaaccagtcaaagctgaactctttcatcacgcaatacagcaccggacaggtcagcgtggaaattgaatgggagctgcagaaggaaaacagcaagcgctggaaccccgagatccagtacacctccaactactacaaatctacaagtgtggactttgctgttaatacagaaggcgtgtactctgaaccccgccccattggcacccgttacctcacccgtaatctgtaattgcctgttaatcaataaaccggttgattcgtttcagttgaactttggtctctgcg

SEQ ID NO: 138 - protein, 738 aa, Adeno-associated virus 8; identical to SEQ ID NO: 129

SEQ ID NO: 139 - protein, 737 aa, Adeno-associated virus 8
MAADGYLPDWLEDNLSEGIREWWALKPGAPKPKANQQKQDDGRGLVLPGYKYLGPFNGLDKGEPVNAADAAALEHDKAYDQQLQAGDNPYLRYNHADAEFQERLQEDTSFGGNLGRAVFQAKKRVLEPLGLVEEGAKTAPGKKRPVEPSPQRSPDSSTGIGKKGQQPARKRLNFGQTGDSESVPDPQPLGEPPAAPSGVGPNTMAAGGGAPMADNNEGADGVGSSSGNWHCDSTWLGDRVITTSTRTWALPTYNNHLYKQISNGTSGGATNDNTYFGYSTPWGYFDFNRFHCHFSPRDWQRLINNNWGFRPKRLSFKLFNIQVKEVTQNEGTKTIANNLTSTIQVFTDSEYQLPYVLGSAHQGCLPPFPADVFMIPQYGYLTLNNGSQAVGRSSFYCLEYFPSQMLRTGNNFQFTYTFEDVPFHSSYAHSQSLDRLMNPLIDQYLYYLSRTQTTGGTANTQTLGFSQGGPNTMANQAKNWLPGPCYRQQRVSTTTGQNNNSNFAWTAGTKYHLNGRNSLANPGIAMATHKDDEERFFPSNGILIFGKQNAARDNADYSDVMLTSEEEIKTTNPVATEEYGIVADNLQQQNTAPQIGTVNSQGALPGMVWQNRDVYLQGPIWAKIPHTDGNFHPSPLMGGFGLKHPPPQILIKNTPVPADPPTTFNQSKLNSFITQYSTGQVSVEIEWELQKENSKRWNPEIQYTSNYYKSTSVDFAVIQKACTLNPAPLAPVTSPVI

SEQ ID NO: 140 - DNA, 2217 bp, Adeno-associated virus 8; identical to SEQ ID NO: 135

SEQ ID NO: 141 - DNA, 2214 bp, Artificial Sequence
  Description of Artificial Sequence: Synthetic polypeptide
atggctgccgatggttatcttccagattggctcgaggacaacctctctgagggcattcgcgagtggtgggcgctgaaacctggagccccgaagcccaaagccaaccagcaaaagcaggacgacggccggggtctggtgcttcctggctacaagtacctcggacccttcaacggactcgacaagggggagcccgtcaacgcggcggacgcagcggccctcgagcacgacaaggcctacgaccagcagctgcaggcgggtgacaatccgtacctgcggtataaccacgccgacgccgagtttcaggagcgtctgcaagaagatacgtcttttgggggcaacctcgggcgagcagtcttccaggccaagaagcgggttctcgaacctctcggtctggttgaggaaggcgctaagacggctcctggaaagaagagaccggtagagccatcaccccagcgttctccagactcctctacgggcatcggcaagaaaggccaacagcccgccagaaaaagactcaattttggtcagactggcgactcagagtcagttccagaccctcaacctctcggagaacctccagcagcgccctctggtgtgggacctaatacaatggctgcaggcggtggcgcaccaatggcagacaataacgaaggcgccgacggagtgggtagttcctcgggaaattggcattgcgattccacatggctgggcgacagagtcatcaccaccagcacccgaacctgggccctgcccacctacaacaaccacctctacaagcaaatctccaacgggacatcgggaggagccaccaacgacaacacctacttcggctacagcaccccctgggggtattttgactttaacagattccactgccacttttcaccacgtgactggcagcgactcatcaacaacaactggggattccggcccaagagactcagcttcaagctcttcaacatccaggtcaaggaggtcacgcagaatgaaggcaccaagaccatcgccaataacctcaccagcaccatccaggtgtttacggactcggagtaccagctgccgtacgttctcggctctgcccaccagggctgcctgcctccgttcccggcggacgtgttcatgattccccagtacggctacctaacactcaacaacggtagtcaggccgtgggacgctcctccttctactgcctggaatactttccttcgcagatgctgagaaccggcaacaacttccagtttacttacaccttcgaggacgtgcctttccacagcagctacgcccacagccagagcttggaccggctgatgaatcctctgattgaccagtacctgtactacttgtctcggactcaaacaacaggaggcacggcaaatacgcagactctgggcttcagccaaggtgggcctaatacaatggccaatcaggcaaagaactggctgccaggaccctgttaccgccaacaacgcgtctcaacgacaaccgggcaaaacaacaatagcaactttgcctggactgctgggaccaaataccatctgaatggaagaaattcattggctaatcctggcatcgctatggcaacacacaaagacgacgaggagcgtttttttcccagtaacgggatcctgatttttggcaaacaaaatgctgccagagacaatgcggattacagcgatgtcatgctcaccagcgaggaagaaatcaaaaccactaaccctgtggctacagaggaatacggtatcgtggcagataacttgcctgagcggacggcgatgagtcttccgggaactgtcaacagccagggggccttacccggtatggtctggcagaaccgggacgtgtacctgcagggtcccatctgggccaagattcctcacacggacggcaacttccacccgtctccgctgatgggcggctttggcctgaaacatcctccgcctcagatcctgatcaagaacacgcctgtacctgcggatcctccgaccaccttcaaccagtcaaagctgaactctttcatcacgcaatacagcaccggacaggtcagcgtggaaattgaatgggagctgcagaaggaaaacagcaagcgctggaaccccgagatccagtacacctccaactactacaaatctacaagtgtggactttgctgttaatacagaaggcgtgtactctgaaccccgccccattggcacccgttacctcacccgtaatctg

SEQ ID NO: 142 - protein, 738 aa, Artificial Sequence
  Description of Artificial Sequence: Synthetic polypeptide
MAADGYLPDWLEDNLSEGIREWWALKPGAPKPKANQQKQDDGRGLVLPGYKYLGPFNGLDKGEPVNAADAAALEHDKAYDQQLQAGDNPYLRYNHADAEFQERLQEDTSFGGNLGRAVFQAKKRVLEPLGLVEEGAKTAPGKKRPVEPSPQRSPDSSTGIGKKGQQPARKRLNFGQTGDSESVPDPQPLGEPPAAPSGVGPNTMAAGGGAPMADNNEGADGVGSSSGNWHCDSTWLGDRVITTSTRTWALPTYNNHLYKQISNGTSGGATNDNTYFGYSTPWGYFDFNRFHCHFSPRDWQRLINNNWGFRPKRLSFKLFNIQVKEVTQNEGTKTIANNLTSTIQVFTDSEYQLPYVLGSAHQGCLPPFPADVFMIPQYGYLTLNNGSQAVGRSSFYCLEYFPSQMLRTGNNFQFTYTFEDVPFHSSYAHSQSLDRLMNPLIDQYLYYLSRTQTTGGTANTQTLGFSQGGPNTMANQAKNWLPGPCYRQQRVSTTTGQNNNSNFAWTAGTKYHLNGRNSLANPGIAMATHKDDEERFFPSNGILIFGKQNAARDNADYSDVMLTSEEEIKTTNPVATEEYGIVADNLPERTAMSLPGTVNSQGALPGMVWQNRDVYLQGPIWAKIPHTDGNFHPSPLMGGFGLKHPPPQILIKNTPVPADPPTTFNQSKLNSFITQYSTGQVSVEIEWELQKENSKRWNPEIQYTSNYYKSTSVDFAVNTEGVYSEPRPIGTRYLTRNL

SEQ ID NO: 143 - DNA, 2214 bp, Artificial Sequence
  Description of Artificial Sequence: Synthetic polynucleotide
atggctgccgatggttatcttccagattggctcgaggacaacctctctgagggcattcgcgagtggtgggcgctgaaacctggagccccgaagcccaaagccaaccagcaaaagcaggacgacggccggggtctggtgcttcctggctacaagtacctcggacccttcaacggactcgacaagggggagcccgtcaacgcggcggacgcagcggccctcgagcacgacaaggcctacgaccagcagctgcaggcgggtgacaatccgtacctgcggtataaccacgccgacgccgagtttcaggagcgtctgcaagaagatacgtcttttgggggcaacctcgggcgagcagtcttccaggccaagaagcgggttctcgaacctctcggtctggttgaggaaggcgctaagacggctcctggaaagaagagaccggtagagccatcaccccagcgttctccagactcctctacgggcatcggcaagaaaggccaacagcccgccagaaaaagactcaattttggtcagactggcgactcagagtcagttccagaccctcaacctctcggagaacctccagcagcgccctctggtgtgggacctaatacaatggctgcaggcggtggcgcaccaatggcagacaataacgaaggcgccgacggagtgggtagttcctcgggaaattggcattgcgattccacatggctgggcgacagagtcatcaccaccagcacccgaacctgggccctgcccacctacaacaaccacctctacaagcaaatctccaacgggacatcgggaggagccaccaacgacaacacctacttcggctacagcaccccctgggggtattttgactttaacagattccactgccacttttcaccacgtgactggcagcgactcatcaacaacaactggggattccggcccaagagactcagcttcaagctcttcaacatccaggtcaaggaggtcacgcagaatgaaggcaccaagaccatcgccaataacctcaccagcaccatccaggtgtttacggactcggagtaccagctgccgtacgttctcggctctgcccaccagggctgcctgcctccgttcccggcggacgtgttcatgattccccagtacggctacctaacactcaacaacggtagtcaggccgtgggacgctcctccttctactgcctggaatactttccttcgcagatgctgagaaccggcaacaacttccagtttacttacaccttcgaggacgtgcctttccacagcagctacgcccacagccagagcttggaccggctgatgaatcctctgattgaccagtacctgtactacttgtctcggactcaaacaacaggaggcacggcaaatacgcagactctgggcttcagccaaggtgggcctaatacaatggccaatcaggcaaagaactggctgccaggaccctgttaccgccaacaacgcgtctcaacgacaaccgggcaaaacaacaatagcaactttgcctggactgctgggaccaaataccatctgaatggaagaaattcattggctaatcctggcatcgctatggcaacacacaaagacgacgaggagcgtttttttcccagtaacgggatcctgatttttggcaaacaaaatgctgccagagacaatgcggattacagcgatgtcatgctcaccagcgaggaagaaatcaaaaccactaaccctgtggctacagaggaatacggtatcgtggcagataacttgagttttagtcgtgcggttctttgtgatggaactgtcaacagccagggggccttacccggtatggtctggcagaaccgggacgtgtacctgcagggtcccatctgggccaagattcctcacacggacggcaacttccacccgtctccgctgatgggcggctttggcctgaaacatcctccgcctcagatcctgatcaagaacacgcctgtacctgcggatcctccgaccaccttcaaccagtcaaagctgaactctttcatcacgcaatacagcaccggacaggtcagcgtggaaattgaatgggagctgcagaaggaaaacagcaagcgctggaaccccgagatccagtacacctccaactactacaaatctacaagtgtggactttgctgttaatacagaaggcgtgtactctgaaccccgccccattggcacccgttacctcacccgtaatctg

SEQ ID NO: 144 - protein, 738 aa, Artificial Sequence
  Description of Artificial Sequence: Synthetic polypeptide
MAADGYLPDWLEDNLSEGIREWWALKPGAPKPKANQQKQDDGRGLVLPGYKYLGPFNGLDKGEPVNAADAAALEHDKAYDQQLQAGDNPYLRYNHADAEFQERLQEDTSFGGNLGRAVFQAKKRVLEPLGLVEEGAKTAPGKKRPVEPSPQRSPDSSTGIGKKGQQPARKRLNFGQTGDSESVPDPQPLGEPPAAPSGVGPNTMAAGGGAPMADNNEGADGVGSSSGNWHCDSTWLGDRVITTSTRTWALPTYNNHLYKQISNGTSGGATNDNTYFGYSTPWGYFDFNRFHCHFSPRDWQRLINNNWGFRPKRLSFKLFNIQVKEVTQNEGTKTIANNLTSTIQVFTDSEYQLPYVLGSAHQGCLPPFPADVFMIPQYGYLTLNNGSQAVGRSSFYCLEYFPSQMLRTGNNFQFTYTFEDVPFHSSYAHSQSLDRLMNPLIDQYLYYLSRTQTTGGTANTQTLGFSQGGPNTMANQAKNWLPGPCYRQQRVSTTTGQNNNSNFAWTAGTKYHLNGRNSLANPGIAMATHKDDEERFFPSNGILIFGKQNAARDNADYSDVMLTSEEEIKTTNPVATEEYGIVADNLSFSRAVLCDGTVNSQGALPGMVWQNRDVYLQGPIWAKIPHTDGNFHPSPLMGGFGLKHPPPQILIKNTPVPADPPTTFNQSKLNSFITQYSTGQVSVEIEWELQKENSKRWNPEIQYTSNYYKSTSVDFAVNTEGVYSEPRPIGTRYLTRNL

SEQ ID NO: 145 - DNA, 4385 bp, Adeno-associated virus 9
cagagagggagtggccaactccatcactaggggtaatcgcgaagcgcctcccacgctgccgcgtcagcgctgacgtagattacgtcataggggagtggtcctgtattagctgtcacgtgagtgcttttgcgacattttgcgacaccacatggccatttgaggtatatatggccgagtgagcgagcaggatctccattttgaccgcgaaatttgaacgagcagcagccatgccgggcttctacgagattgtgatcaaggtgccgagcgacctggacgagcacctgccgggcatttctgactcttttgtgaactgggtggccgagaaggaatgggagctgcccccggattctgacatggatcggaatctgatcgagcaggcacccctgaccgtggccgagaagctgcagcgcgacttcctggtccaatggcgccgcgtgagtaaggccccggaggccctcttctttgttcagttcgagaagggcgagagctactttcacctgcacgttctggtcgagaccacgggggtcaagtccatggtgctaggccgcttcctgagtcagattcgggagaagctggtccagaccatctaccgcgggatcgagccgaccctgcccaactggttcgcggtgaccaagacgcgtaatggcgccggcggggggaacaaggtggtggacgagtgctacatccccaactacctcctgcccaagactcagcccgagctgcagtgggcgtggactaacatggaggagtatataagcgcgtgcttgaacctggccgagcgcaaacggctcgtggcgcagcacctgacccacgtcagccagacgcaggagcagaacaaggagaatctgaaccccaattctgacgcgcccgtgatcaggtcaaaaacctccgcgcgctacatggagctggtcgggtggctggtggaccggggcatcacctccgagaagcagtggatccaggaggaccaggcctcgtacatctccttcaacgccgcctccaactcgcggtcccagatcaaggccgcgctggacaatgccggcaagatcatggcgctgaccaaatccgcgcccgactacctggtaggcccttcacttccggtggacattacgcagaaccgcatctaccgcatcctgcagctcaacggctacgaccctgcctacgccggctccgtctttctcggctgggcacaaaagaagttcgggaaacgcaacaccatctggctgtttgggccggccaccacgggaaagaccaacatcgcagaagccattgcccacgccgtgcccttctacggctgcgtcaactggaccaatgagaactttcccttcaacgattgcgtcgacaagatggtgatctggtgggaggagggcaagatgacggccaaggtcgtggagtccgccaaggccattctcggcggcagcaaggtgcgcgtggaccaaaagtgcaagtcgtccgcccagatcgaccccactcccgtgatcgtcacctccaacaccaacatgtgcgccgtgattgacgggaacagcaccaccttcgagcaccagcagcctctccaggaccggatgtttaagttcgaactcacccgccgtctggagcacgactttggcaaggtgacaaagcaggaagtcaaagagttcttccgctgggccagtgatcacgtgaccgaggtggcgcatgagttttacgtcagaaagggcggagccagcaaaagacccgcccccgatgacgcggataaaagcgagcccaagcgggcctgcccctcagtcgcggatccatcgacgtcagacgcggaaggagctccggtggactttgccgacaggtaccaaaacaaatgttctcgtcacgcgggcatgcttcagatgctgcttccctgcaaaacgtgcgagagaatgaatcagaatttcaacatttgcttcacacacggggtcagagactgctcagagtgtttccccggcgtgtcagaatctcaaccggtcgtcagaaagaggacgtatcggaaactctgtgcgattcatcatctgctggggcgggctcccgagattgcttgctcggcctgcgatctggtcaacgtggacctggatgactgtgtttctgagcaataaatgacttaaaccaggtatggctgccgatggttatcttccagattggctcgaggacaacctctctgagggcattcgcgagtggtgggcgctgaaacctggagccccgaagcccaaagccaaccagcaaaagcaggacgacggccggggtctggtgcttcctggctacaagtacctcggacccttcaacggactcgacaagggggagcccgtcaacgcggcggacgcagcggccctcgagcacggcaaggcctacgaccagcagctgcaggcgggtgacaatccgtacctgcggtataaccacgccgacgccgagtttcaggagcgtctgcaagaagatacgtcttttgggggcaacctcgggcgagcagtcttccaggccaagaagcgggttctcgaacctctcggtctggttgaggaaggcgctaagacggctcctggaaagaagagaccggtagagccatcaccccagcgttctccagactcctctacgggcatcggcaagaaaggccaacagcccgccagaaaaagactcaattttggtcagactggcgactcagagtcagttccagaccctcaacctctcggagaacctccagcagcgccctctggtgtgggacctaatacaatggctgcaggcggtggcgcaccaatggcagacaataacgaaggcgccgacggagtgggtaattcctcgggaaattggcattgcgattccacatggctgggggacagagtcatcaccaccagcacccgaacctgggcattgcccacctacaacaaccacctctacaagcaaatctccaatggaacatcgggaggaagcaccaacgacaacacctactttggctacagcaccccctgggggtattttgacttcaacagattccactgccacttctcaccacgtgactggcagcgactcatcaacaacaactggggattccggccaaagagactcaacttcaagctgttcaacatccaggtcaaggaggttacgacgaacgaaggcaccaagaccatcgccaataaccttaccagcaccgtccaggtctttacggactcggagtaccagctaccgtacgtcctaggctctgcccaccaaggatgcctgccaccgtttcctgcagacgtcttcatggttcctcagtacggctacctgacgctcaacaatggaagtcaagcgttaggacgttcttctttctactgtctggaatacttcccttctcagatgctgagaaccggcaacaactttcagttcagctacactttcgaggacgtgcctttccacagcagctacgcacacagccagagtctagatcgactgatgaaccccctcatcgaccagtacctatactacctggtcagaacacagacaactggaactgggggaactcaaactttggcattcagccaagcaggccctagctcaatggccaatcaggctagaaactgggtacccgggccttgctaccgtcagcagcgcgtctccacaaccaccaaccaaaataacaacagcaactttgcgtggacgggagctgctaaattcaagctgaacgggagagactcgctaatgaatcctggcgtggctatggcatcgcacaaagacgacgaggaccgcttctttccatcaagtggcgttctcatatttggcaagcaaggagccgggaacgatggagtcgactacagccaggtgctgattacagatgaggaagaaattaaagccaccaaccctgtagccacagaggaatacggagcagtggccatcaacaaccaggccgctaacacgcaggcgcaaactggacttgtgcataaccagggagttattcctggtatggtctggcagaaccgggacgtgtacctgcagggccctatttgggctaaaatacctcacacagatggcaactttcacccgtctcctctgatgggtggatttggactgaaacacccacctccacagattctaattaaaaatacaccagtgccggcagatcctcctcttaccttcaatcaagccaagctgaactctttcatcacgcagtacagcacgggacaagtcagcgtggaaatcgagtgggagctgcagaaagaaaacagcaagcgctggaatccagagatccagtatacttcaaactactacaaatctacaaatgtggactttgctgtcaataccaaaggtgtttactctgagcctcgccccattggtactcgttacctcacccgtaatttgtaattgcctgttaatcaataaaccggttaattcgtttcagttgaactttggtctctgcg

SEQ ID NO: 146 - DNA, 4382 bp, Adeno-associated virus 9
cagagagggagtggccaactccatcactaggggtaatcgcgaagcgcctcccacgctgccgcgtcagcgctgacgtagattacgtcataggggagtggtcctgtattagctgtcacgtgagtgcttttgcgacattttgcgacaccacatggccatttgaggtatatatggccgagtgagcgagcaggatctccattttgaccgcgaaatttgaacgagcagcagccatgccgggcttctacgagattgtgatcaaggtgccgagcgacctggacgagcacctgccgggcatttctgactcttttgtgaactgggtggccgagaaggaatgggagctgcccccggattctgacatggatcggaatctgatcgagcaggcacccctgaccgtggccgagaagctgtagcgcgacttcctggtccaatggcgccgcgtgagtaaggccccggaggccctcttctttgttcagttcgagaagggcgagagctactttcacctgcacgttctggtcgagaccacgggggtcaagtccatggtgctaggccgcttcctgagtcagattcgggagaagctggtccagaccatctaccgcgggatcgagccgaccctgcccaactggttcgcggtgaccaagacgcgtaatggcgccggcggggggaacaaggtggtggacgagtgctacatccccaactacctcctgcccaagactcagcccgagctgcagtgggcgtggactaacatggaggagtatataagcgcgtgcttgaacctggccgagcgcaaacggctcgtggcgcagcacctgacccacgtcagccagacgcaggagcagaacaaggagaatctgaaccccaattctgacgcgcccgtgatcaggtcaaaaacctccgcgcgctacatggagctggtcgggtggctggtggaccggggcatcacctccgagaagcagtggatccaggaggaccaggcctcgtacatctccttcaacgccgcctccaactcgcggtcccagatcaaggccgcgctggacaatgccggcaagatcatggcgctgaccaaatccgcgcccgactacctggtaggcccttcacttccggtggacattacgcagaaccgcatctaccgcatcctgcagctcaacggctacgaccctgcctacgccggctccgtctttctcggctgggcacaaaagaagttcgggaaacgcaacaccatctggctgtttgggccggccaccacgggaaagaccaacatcgcagaagccattgcccacgccgtgcccttctacggctgcgtcaactggaccaatgagaactttcccttcaacgattgcgtcgacaagatggtgatctggtgggaggagggcaagatgacggccaaggtcgtggagtccgccaaggccattctcggcggcagcaaggtgcgcgtggaccaaaagtgcaagtcgtccgcccagatcgaccccactcccgtgatcgtcacctccaacaccaacatgtgcgccgtgattgacgggaacagcaccaccttcgagcaccagcagcctctccaggaccggatgtttaagttcgaactcacccgccgtctggagcacgactttggcaaggtgacaaagcaggaagtcaaagagttcttccgctgggccagtgatcacgtgaccgaggtggcgcatgagttttacgtcagaaagggcggagccagcaaaagacccgcccccgatgacgcggataaaagcgagcccaagcgggcctgcccctcagtcgcggatccatcgacgtcagacgcggaaggagctccggtggactttgccgacaggtaccaaaacaaatgttctcgtcacgcgggcatgcttcagatgctgcttccctgcaaaacgtgcgagagaatgaatcagaatttcaacatttgcttcacacacggggtcagagactgctcagagtgtttccccggcgtgtcagaatctcaaccggtcgtcagaaagaggacgtatcggaaactctgtgcgattcatcatctgctggggcgggctcccgagattgcttgctcggcctgcgatctggtcaacgtggacctggatgactgtgtttctgagcaataaatgacttaaaccaggtatggctgccgatggttatcttccagattggctcgaggacaacctctctgagggcattcgcgagtggtgggacctgaaacctggagccccgaaacccaaagccaaccagcaaaagcaggacgacggccggggtctggtgcttcctggctacaagtacctcggacccttcaacggactcgacaagggggagcccgtcaacgcggcggacgcagcggccctcgagcacgacaaggcctacgaccagcagctcaaagcgggtgacaatccgtacctgcggtataaccacgccgacgccgagtttcaggagcgtctgcaagaagatacgtcttttgggggcaacctcgggcgagcagtcttccaggccaagaagcgggttctcgaacctctcggtctggttgaggaaggcgctaagacggctcctggaaagaagagaccggtagagcagtcaccccaagaaccagactcatcctcgggcatcggcaaatcaggccagcagcccgctaaaaagagactcaattttggtcagactggcgactcagagtcagtccccgacccacaacctctcggagaacctccagaagccccctcaggtctgggacctaatacaatggcttcaggcggtggcgctccaatggcagacaataacgaaggcgccgacggagtgggtaattcctcgggaaattggcattgcgattccacatggctgggggacagagtcatcaccaccagcacccgaacctgggcattgcccacctacaacaaccacctctacaagcaaatctccaatggaacatcgggaggaagcaccaacgacaacacctactttggctacagcaccccctgggggtattttgacttcaacagattccactgccacttctcaccacgtgactggcagcgactcatcaacaacaactggggattccggccaaagagactcaacttcaagctgttcaacatccaggtcaaggaggttacgacgaacgaaggcaccaagaccatcgccaataaccttaccagcaccgtccaggtctttacggactcggagtaccagctaccgtacgtcctaggctctgcccaccaaggatgcctgccaccgtttcctgcagacgtcttcatggttcctcagtacggctacctgacgctcaacaatggaagtcaagcgttaggacgttcttctttctactgtctggaatacttcccttctcagatgctgagaaccggcaacaactttcagttcagctacactttcgaggacgtgcctttccacagcagctacgcacacagccagagtctagatcgactgatgaaccccctcatcgaccagtacctatactacctggtcagaacacagacaactggaactgggggaactcaaactttggcattcagccaagcaggccctagctcaatggccaatcaggctagaaactgggtacccgggccttgctaccgtcagcagcgcgtctccacaaccaccaaccaaaataacaacagcaactttgcgtggacgggagctgctaaattcaagctgaacgggagagactcgctaatgaatcctggcgtggctatggcatcgcacaaagacgacgaggaccgcttctttccatcaagtggcgttctcatatttggcaagcaaggagccgggaacgatggagtcgactacagccaggtgctgattacagatgaggaagaaattaaagccaccaaccctgtagccacagaggaatacggagcagtggccatcaacaaccaggccgctaacacgcaggcgcaaactggacttgtgcataaccagggagttattcctggtatggtctggcagaaccgggacgtgtacctgcagggccctatttgggctaaaatacctcacacagatggcaactttcacccgtctcctctgatgggtggatttggactgaaacacccacctccacagattctaattaaaaatacaccagtgccggcagatcctcctcttaccttcaatcaagccaagctgaactctttcatcacgcagtacagcacgggacaagtcagcgtggaaatcgagtgggagctgcagaaagaaaacagcaagcgctggaatccagagatccagtatacttcaaactactacaaatctacaaatgtggactttgctgtcaataccgaaggtgtttactctgagcctcgccccattggtactcgttacctcacccgtaatttgtaattgcctgttaatcaataaaccggttaattcgtttcagttgaactttggtctctgcg

SEQ ID NO: 147 - protein, 736 aa, Adeno-associated virus 9
MAADGYLPDWLEDNLSEGIREWWALKPGAPQPKANQQHQDNARGLVLPGYKYLGPGNGLDKGEPVNAADAAALEHDKAYDQQLKAGDNPYLKYNHADAEFQERLKEDTSFGGNLGRAVFQAKKRLLEPLGLVEEAAKTAPGKKRPVEQSPQEPDSSAGIGKSGAQPAKKRLNFGQTGDTESVPDPQPIGEPPAAPSGVGSLTMASGGGAPVADNNEGADGVGSSSGNWHCDSQWLGDRVITTSTRTWALPTYNNHLYKQISNSTSGGSSNDNAYFGYSTPWGYFDFNRFHCHFSPRDWQRLINNNWGFRPKRLNFKLFNIQVKEVTDNNGVKTIANNLTSTVQVFTDSDYQLPYVLGSAHEGCLPPFPADVFMIPQYGYLTLNDGSQAVGRSSFYCLEYFPSQMLRTGNNFQFSYEFENVPFHSSYAHSQSLDRLMNPLIDQYLYYLSKTINGSGQNQQTLKFSVAGPSNMAVQGRNYIPGPSYRQQRVSTTVTQNNNSEFAWPGASSWALNGRNSLMNPGPAMASHKEGEDRFFPLSGSLIFGKQGTGRDNVDADKVMITNEEEIKTTNPVATESYGQVATNHQSAQAQAQTGWVQNQGILPGMVWQDRDVYLQGPIWAKIPHTDGNFHPSPLMGGFGMKHPPPQILIKNTPVPADPPTAFNKDKLNSFITQYSTGQVSVEIEWELQKENSKRWNPEIQYTSNYYKSNNVEFAVNTEGVYSEPRPIGTRYLTRNL

SEQ ID NO: 148 - protein, 736 aa, Adeno-associated virus 9
MAADGYLPDWLEDNLSEGIREWWDLKPGAPKPKANQQKQDDGRGLVLPGYKYLGPFNGLDKGEPVNAADAAALEHDKAYDQQLKAGDNPYLRYNHADAEFQERLQEDTSFGGNLGRAVFQAKKRVLEPLGLVEEGAKTAPGKKRPVEQSPQEPDSSSGIGKSGQQPAKKRLNFGQTGDSESVPDPQPLGEPPEAPSGLGPNTMASGGGAPMADNNEGADGVGNSSGNWHCDSTWLGDRVITTSTRTWALPTYNNHLYKQISNGTSGGSTNDNTYFGYSTPWGYFDFNRFHCHFSPRDWQRLINNNWGFRPKRLNFKLFNIQVKEVTTNEGTKTIANNLTSTVQVFTDSEYQLPYVLGSAHQGCLPPFPADVFMVPQYGYLTLNNGSQALGRSSFYCLEYFPSQMLRTGNNFQFSYTFEDVPFHSSYAHSQSLDRLMNPLIDQYLYYLVRTQTTGTGGTQTLAFSQAGPSSMANQARNWVPGPCYRQQRVSTTTNQNNNSNFAWTGAAKFKLNGRDSLMNPGVAMASHKDDEDRFFPSSGVLIFGKQGAGNDGVDYSQVLITDEEEIKATNPVATEEYGAVAINNQAANTQAQTGLVHNQGVIPGMVWQNRDVYLQGPIWAKIPHTDGNFHPSPLMGGFGLKHPPPQILIKNTPVPADPPLTFNQAKLNSFITQYSTGQVSVEIEWELQKENSKRWNPEIQYTSNYYKSTNVDFAVNTEGVYSEPRPIGTRYLTRNL

SEQ ID NO: 149 - protein, 623 aa, Adeno-associated virus 9
MPGFYEIVIKVPSDLDEHLPGISDSFVNWVAEKEWELPPDSDMDRNLIEQAPLTVAEKLQRDFLVQWRRVSKAPEALFFVQFEKGESYFHLHVLVETTGVKSMVLGRFLSQIREKLVQTIYRGIEPTLPNWFAVTKTRNGAGGGNKVVDECYIPNYLLPKTQPELQWAWTNMEEYISACLNLAERKRLVAQHLTHVSQTQEQNKENLNPNSDAPVIRSKTSARYMELVGWLVDRGITSEKQWIQEDQASYISFNAASNSRSQIKAALDNAGKIMALTKSAPDYLVGPSLPVDITQNRIYRILQLNGYDPAYAGSVFLGWAQKKFGKRNTIWLFGPATTGKTNIAEAIAHAVPFYGCVNWTNENFPFNDCVDKMVIWWEEGKMTAKVVESAKAILGGSKVRVDQKCKSSAQIDPTPVIVTSNTNMCAVIDGNSTTFEHQQPLQDRMFKFELTRRLEHDFGKVTKQEVKEFFRWASDHVTEVAHEFYVRKGGASKRPAPDDADKSEPKRACPSVADPSTSDAEGAPVDFADRYQNKCSRHAGMLQMLLPCKTCERMNQNFNICFTHGVRDCSECFPGVSESQPVVRKRTYRKLCAIHHLLGRAPEIACSACDLVNVDLDDCVSEQ

SEQ ID NO: 150 - DNA, 2211 bp, Adeno-associated virus
atggctgccgatggttatcttccagattggctcgaggacaaccttagtgaaggaattcgcgagtggtgggctttgaaacctggagcccctcaacccaaggcaaatcaacaacatcaagacaacgctcgaggtcttgtgcttccgggttacaaataccttggacccggcaacggactcgacaagggggagccggtcaacgcagcagacgcggcggccctcgagcacgacaaggcctacgaccagcagctcaaggccggagacaacccgtacctcaagtacaaccacgccgacgccgagttccaggagcggctcaaagaagatacgtcttttgggggcaacctcgggcgagcagtcttccaggccaaaaagaggcttcttgaacctcttggtctggttgaggaagcggctaagacggctcctggaaagaagaggcctgtagagcagtctcctcaggaaccggactcctccgcgggtattggcaaatcgggtgcacagcccgctaaaaagagactcaatttcggtcagactggcgacacagagtcagtcccagaccctcaaccaatcggagaacctcccgcagccccctcaggtgtgggatctcttacaatggcttcaggtggtggcgcaccagtggcagacaataacgaaggtgccgatggagtgggtagttcctcgggaaattggcattgcgattcccaatggctgggggacagagtcatcaccaccagcacccgaacctgggccctgcccacctacaacaatcacctctacaagcaaatctccaacagcacatctggaggatcttcaaatgacaacgcctacttcggctacagcaccccctgggggtattttgacttcaacagattccactgccacttctcaccacgtgactggcagcgactcatcaacaacaactggggattccggcctaagcgactcaacttcaagctcttcaacattcaggtcaaagaggttacggacaacaatggagtcaagaccatcgccaataaccttaccagcacggtccaggtcttcacggactcagactatcagctcccgtacgtgctcgggtcggctcacgagggctgcctcccgccgttcccagcggacgttttcatgattcctcagtacgggtatctgacgcttaatgatggaagccaggccgtgggtcgttcgtccttttactgcctggaatatttcccgtcgcaaatgctaagaacgggtaacaacttccagttcagctacgagtttgagaacgtacctttccatagcagctacgctcacagccaaagcctggaccgactaatgaatccactcatcgaccaatacttgtactatctctcaaagactattaacggttctggacagaatcaacaaacgctaaaattcagtgtggccggacccagcaacatggctgtccagggaagaaactacatacctggacccagctaccgacaacaacgtgtctcaaccactgtgactcaaaacaacaacagcgaatttgcttggcctggagcttcttcttgggctctcaatggacgtaatagcttgatgaatcctggacctgctatggccagccacaaagaaggagaggaccgtttctttcctttgtctggatctttaatttttggcaaacaaggaactggaagagacaacgtggatgcggacaaagtcatgataaccaacgaagaagaaattaaaactactaacccggtagcaacggagtcctatggacaagtggccacaaaccaccagagtgcccaagcacaggcgcagaccggctgggttcaaaaccaaggaatacttccgggtatggtttggcaggacagagatgtgtacctgcaaggacccatttgggccaaaattcctcacacggacggcaactttcacccttctccgctgatgggagggtttggaatgaagcacccgcctcctcagatcctcatcaaaaacacacctgtacctgcggatcctccaacggccttcaacaaggacaagctgaactctttcatcacccagtattctactggccaagtcagcgtggagatcgagtgggagctgcagaaggaaaacagcaagcgctggaacccggagatccagtacacttccaactattacaagtctaataatgttgaatttgctgttaatactgaaggtgtatatagtgaaccccgccccattggcaccagatacctgactcgtaatctgtaa

SEQ ID NO: 151 - protein, 736 aa, Adeno-associated virus; identical to SEQ ID NO: 147

SEQ ID NO: 152 - DNA, 2460 bp, Adeno-associated virus
ggtaattcctccggaaattggcattgcgattccacatggctgggcgaccgagtcattaccaccagcacccggacttgggccctgcccacctacaacaaccacctctacaagcaaatctccagccaatcgggtgccaccaacgacaaccactacttcggctacagcaccccttgggggtattttgatttcaacagattccactgccatttctcaccacgtgactggcagcgactcatcaacaacaactggggattcatggctgccgatggttatcttccagattggctcgaggacactctctctgaaggaatcagacagtggtggaagctcaaacctggcccaccaccgccgaaacctaaccaacaacaccgggacgacagtaggggtcttgtgcttcctgggtacaagtacctcggacccttcaacggactcgacaaaggagagccggtcaacgaggcagacgccgcggccctcgagcacgacaaagcctacgaccaccagctcaagcaaggggacaacccgtacctcaaatacaaccacgcggacgctgaatttcaggagcgtcttcaagaagatacgtctttcgggggcaacctcgggcgagcagtcttccaggccaaaaagagggtactcgagcctcttggtctggttgaggaagctgttaagacggctcctggaaaaaagagacctatagagcagtctcctgcagaaccggactcttcctcgggcatcggcaaatcaggccagcagcccgctaagaaaagactcaattttggtcagactggcgacacagagtcagtcccagaccctcaaccaatcggagaaccccccgcagccccctctggtgtgggatctaatacaatggcttcaggcggtggggcaccaatggcagacaataacgaaggcgccgacggagtgggtaattcctcgggaaattggcattgcgattccacatggatgggcgacagagttatcaccaccagcacaagaacctgggccctccccacctacaataatcacctctacaagcaaatctccagcgaatcgggagccaccaacgacaaccactacttcggctacagcaccccctgggggtattttgactttaacagattccactgtcacttctcaccacgtgactggcagcgactcatcaacaacaactggggatttagacccaagaaactcaatttcaagctcttcaacatccaagtcaaggaggtcacgcagaatgatggaaccacgaccatcgccaataaccttaccagcacggtgcaggtcttcacagactctgagtaccagctgccctacgtcctcggttcggctcaccagggctgccttccgccgttcccagcagacgtcttcatgattcctcagtacggctacttgactctgaacaatggcagccaagcggtaggacgttcttcattctactgtctagagtattttccctctcagatgctgaggacgggaaacaacttcaccttcagctacacttttgaagacgtgcctttccacagcagctacgcgcacagccagagtctggatcggctgatgaatcctctcattgaccagtacctgtattacctgagcaaaactcagggtacaagtggaacaacgcagcaatcgagactgcagttcagccaagctgggcctagctccatggctcagcaggccaaaaactggctaccgggacccagctaccgacagcagcgaatgtctaagacggctaatgacaacaacaacagtgaatttgcttggactgcagccaccaaatattacctgaatggaagaaattctctggtcaatcccgggcccccaatggccagtcacaaggacgatgaggaaaagtatttccccatgcacggaaatctcatctttggaaaacaaggcacaggaactaccaatgtggacattgaatcagtgcttattacagacgaagaagaaatcagaacaactaatcctgtggctacagaacaatacggacaggttgccaccaaccatcagagtcagaacaccacagcttcctatggaagtgtggacagccagggaatcttacctggaatggtgtggcaggaccgcgatgtctatcttcaaggtcccatttgggccaaaactcctcacacggacggacactttcatccttctccgctcatgggaggctttggactgaaacaccctcctccccagatcctgatcaaaaacacacctgtgccagcgaatcccgcgaccactttcactcctggaaagtttgcttcgttcattacccagtattccaccggacaggtcagcgtggaaatagagtgggagctgcagaaagaaaacagcaaacgctggaacccagaaattcagtacacctccaactacaacaagtcggtgaatgtggagtttaccgtggacgcaaacggtgtttattctgaaccccgccctattggcactcgttaccttacccggaacttg

SEQ ID NO: 153 - DNA, 3123 bp, Adeno-associated virus
gaattcgccctttctacggctgcgtcaactggaccaatgaaaactttcccttcaacgattgcgtcgacaagatggtgatctggtgggaggagggaaagatgaccgccaaggtcgtggaatctgccaaagccattctgggtggaggcaaggttcgtgtggaccagaaatgcaagtcttcggcccagatcgacccgactccggtgattgtcacctctaacaccaacatgtgcgccgtgattgacggaaactcgaccaccttcgagcaccagcagccgttgcaagaccggatgttcaaatttgaacttacccgccgtttggatcatgactttgggaaggtcaccaagcaggaagtcaaagactttttccggtgggctcaagatcacgtgactgaggtggagcatgagttctacgtcaaaaagggtggagccaagaaaaggcccgcccccgatgatgtatatataaatgagcccaagcgggcgcgcgagtcagttgcgcagccatcgacgtcagacgcggaagcttcgataaactacgcggacaggtaccaaaacaaatgttctcgtcacgtgggcatgaatctgatgctgtttccctgtcgacaatgcgaaagaatgaatcagaattcaaatatctgcttcacacacgggcaaaaagactgtttggaatgctttcccgtgtcagaatctcaacccgtttctgtcgtcagaaaaacgtatcagaaactttgttacattcatcatatcatgggaaaagtaccagacgcctgcactgcctgcgacctggtaaatgtggacttggatgactgtatttctgagcaataaatgacttaaatcaggtatggctgctgacggttatcttccagattggctcgaggacactctctctgaaggaatcagacagtggtggaagctcaaacctggcccaccaccgccgaaacctaaccaacaacaccgggacgacagtaggggtcttgtgcttcctgggtacaagtacctcggacccttcaacggactcgacaaaggagagccggtcaacgaggcagacgccgcggccctcgagcacgacaaagcctacgaccaccagctcaagcaaggggacaacccgtacctcaaatacaaccacgcggacgctgaatttcaggagcgtcttcaagaagatacgtctttcgggggcaacctcgggcgagcagtcttccaggccaaaaagagggtactcgagcctcttggtctggttgaggaagctgttaagacggctcctggaaaaaagagacctatagagcagtctcctgcagaaccggactcttcctcgggcatcggcaaatcaggccagcagcccgctaagaaaagactcaattttggtcagactggcgacacagagtcagtcccaggccctcaaccaatcggagaaccccccgcagccccctctggtgtgggatctaatacaatggcttcaggcggtggggcaccaatggcagacaataacgaaggcgccgacggagtgggtaattcctcgggaaattggcattgcgattccacatggatgggcgacagagttatcaccaccagcacaagaacctgggccctccccacctacaataatcacctctacaagcaaatctccagcgaatcgggagccaccaacgacaaccactacttcggctacagcaccccctgggggtattttgactttaacagattccactgtcacttctcaccacgtgactggcagcgactcatcaacaacaactggggatttagacccaagaaactcaatttcaagctcttcaacatccaagtcaaggaggtcacgcagaatgatggaaccacgaccatcgccaataaccttaccagcgcggtgcaggtcttcacagactctgagtaccagctgccctacgtcctcggttcggctcaccagggctgccttccgccgttcccagcagacgtcttcatgattcctcagtacggctacttgactctgaacaatggcagccaagcggtaggacgttcttcattctactgtctagagtattttccctctcagatgctgaggacgggaaacaacttcaccttcagctacacttttgaagacgtgcctttccacagcagctacgcgcacagccagagtctggatcggctgatgaatcctctcattgaccagtacctgtattacctgagcaaaactcagggtacaagtggaacaacgcagcaatcgagactgcagttcagccaagctgggcctagctccatggctcagcaggccaaaaactggctaccgggacccagctaccgacagcagcgaatgtctaagacggctaatgacaacaacaacagtgaatttgcttggactgcagccaccaaatattacctgaatggaagaaattctctggtcaatcccgggcccccagtggccagtcacaaggacgatgaggaaaagtatttccccatgcacggaaatctcatctttggaaaacaaggcacaggaactaccaatgtggacattgaatcagtgcttattacagacgaagaagaaatcagaacaactaatcctgtggctacagaacaatacggacaggttgccaccaaccatcagagtcagaacaccacagcttcctatggaagtgtggacagccagggaatcttacctggaatggtgtggcaggaccgcgatgtctatcttcaaggtcccatttgggccaaaactcctcacacggacggacactttcatccttctccgctcatgggaggctttggactgaaacaccctcctccccagatcctgatcaaaaacacacctgtgccagcgaatcccgcgaccactttcactcctggaaagtttgcttcgttcattacccagtattccacctgacaggtcagcgtggaaatagagtgggagctgcagaaagaaaacagcaaacgctggaacccagaaattcagtacacctccaactacaacaagtcggtgaatgtggagtttaccgtggacgcaaacggtgtttattctgaaccccgccctattggcactcgttaccttacccggaacttgtaatttcctgttaatgaataagccgatttatgcgtttcagttgaactttggtctctgcgaagggcgaattcgtttaaacct

SEQ ID NO: 154 - protein, 735 aa, Adeno-associated virus
MAADGYLPDWLEDTLSEGIRQWWKLKPGPPPPKPNQQHRDDSRGLVLPGYKYLGPFNGLDKGEPVNEADAAALEHDKAYDHQLKQGDNPYLKYNHADAEFQERLQEDTSFGGNLGRAVFQAKKRVLEPLGLVEEAVKTAPGKKRPIEQSPAEPDSSSGIGKSGQQPAKKRLNFGQTGDTESVPGPQPIGEPPAAPSGVGSNTMASGGGAPMADNNEGADGVGNSSGNWHCDSTWMGDRVITTSTRTWALPTYNNHLYKQISSESGATNDNHYFGYSTPWGYFDFNRFHCHFSPRDWQRLINNNWGFRPKKLNFKLFNIQVKEVTQNDGTTTIANNLTSAVQVFTDSEYQLPYVLGSAHQGCLPPFPADVFMIPQYGYLTLNNGSQAVGRSSFYCLEYFPSQMLRTGNNFTFSYTFEDVPFHSSYAHSQSLDRLMNPLIDQYLYYLSKTQGTSGTTQQSRLQFSQAGPSSMAQQAKNWLPGPSYRQQRMSKTANDNNNSEFAWTAATKYYLNGRNSLVNPGPPVASHKDDEEKYFPMHGNLIFGKQGTGTTNVDIESVLITDEEEIRTTNPVATEQYGQVATNHQSQNTTASYGSVDSQGILPGMVWQDRDVYLQGPIWAKTPHTDGHFHPSPLMGGFGLKHPPPQILIKNTPVPANPATTFTPGKFASFITQYSTGQVSVEIEWELQKENSKRWNPEIQYTSNYNKSVNVEFTVDANGVYSEPRPIGTRYLTRNL

SEQ ID NO: 155 - DNA, 3123 bp, Adeno-associated virus
gaattcgccctttctacggctgcgtcaactggaccaatgaaaactttcccttcaacgattgcgtcgacaagatggtgatctggtgggaggagggaaagatgaccgccaaggtcgtggaatctgccaaagccattctgggtggaagcaaggttcgtgtggaccagaaatgcaagtcttcggcccagatcgacccgactccggtgattgtcacctctaacaccaacatgtgcgccgtgattgacggaaactcgaccaccttcgagcaccagcagccgttgcaagaccggatgttcaaatttgaacttacccgccgtttggatcatgactttgggaaggtcaccaagcaggaagtcaaagactttttccggtgggctcaagatcacgtgactgaggtggagcatgagttctacgtcaaaaagggtggagccaagaaaaggcccgcccccgatgatgtatatataaatgagcccaagcgggcgcgcgagtcagttgcgcagccatcgacgtcagacgcggaagcttcgataaactacgcgggcaggtaccaaaacaaatgttctcgtcacgtgggcatgaatctgatgctgtttccctgtcgacaatgcgaaagaatgaatcagaattcaaatatctgcttcacacacgggcaaaaagactgtttggaatgctttcccgtgtcagaatctcaacccgtttctgtcgtcagaaaaacgtatcagaaactttgttacattcatcatatcatgggaaaagaaccagacgcctgcactgcctgcgacctggtaaatgtggacttggatgactgtatttctgagcaataaatgacttaaatcaggtatggctgctgacggttatcttccagattggctcgaggacactctctctgaaggaatcagacagtggtggaagctcaaacctggcccaccaccgccgaaacctaaccaacaacaccgggacgacagtaggggtcttgtgcttcctgggtacaagtacctcggacccttcaacggactcgacaaaggagagccggtcaacgaggcagacgccgcggccctcgagcacgacaaagcctacgaccaccagctcaagcaaggggacaacccgtacctcaaatacaaccacgcggacgctgaatttcaggagcgtcttcaagaagatacgtctttcgggggcaacctcgggcgagcagtcttccaggccaaaaagagggtactcgagcctcttggtctggttgaggaagctgttaagacggctcctggaaaaaagagacctatagagcagtctcctgcagaaccggactcttcctcgggcatcggcgaatcaggccagcagcccgctaagaaaagactcaattttggtcagactggcgacacagagtcagtcccagaccctcaaccaatcggagaaccccccgcagccccctctggtgtgggatctaatacaatggcttcaggcggtggggcaccaatggcagacgataacgaaggcgccgacggagtgggtaattcctcgggaaattggcattgcgattccacatggatgggcgacagagttatcaccaccagcacaagaacctgggccctccccacctacaataatcacctctacaagcaaatctccagcgaatcgggagccaccaacgacaaccactacttcggctacagcaccccctgggggtattttgactttaacagattccactgtcacttctcaccacgtgactggcagcgactcatcaacaacaactggggatttagacccaagaaactcaatttcaagctcttcaacatccaagtcaaggaggtcacgcagaatgatggaaccacgaccatcgccaataaccttaccagcacggtgcaggtcttcacagactctgagtaccagctgccctacgtcctcggttcggctcaccagggctgccttccgccgttcccagcagacgtcttcatgattcctcagtacggctacttgactctgaacaatggcagccaagcggtaggacgttcttcattctactgtctagagtattttccctctcagatgctgaggacgggaaacaacttcaccttcagctacacttttgaagacgtgcctttccacagcagctacgcgcacagccagagtctggatcggctgatgaatcctctcattgaccagtacctgtattacctgagcaaaactcagggtacaagtggaacaacgcagcaatcgagactgcagttcagccaagctgggcctagctccatggctcagcaggccaaaaactggctaccgggacccagctaccgacagcagcgaatgtctaagacggctaatgacaacaacaacagtgaatttgcttggactgcagccaccaaatattacctgaatggaagaaattctctggtcaatcccgggcccccaatggccagtcacaaggacgatgaggaaaagtatttccccatgcacggaaatctcatctttggaaaacaaggcacaggaactaccaatgtggacattgaatcagtgcttattacagacgaagaagaaatcagaacaactaatcctgtggctacagaacaatacggacaggttgccaccaaccatcagagtcaggacaccacagcttcctatggaagtgtggacagccagggaatcttacctggaatggtgtggcaggaccgcgatgtctatcttcaaggtcccatttgggccaaaactcctcacacggacggacactttcatccttctccgctcatgggaggctttggactgaaacaccctcctccccagatcctgatcaaaaacacacctgtgccagcgaatcccgcgaccactttcactcctggaaagtttgcttcgttcattacccagtattccaccggacaggtcagcgtggaaatagagtgggagctgcagaaagaaaacagcaaacgctggaacccagaaattcagtacacctccaactacaacaagtcggtgaatgtggagtttaccgtggacgcaaacggtgtttattctgaaccccgccctattggcactcgttaccttacccggaacttgtaatttcctgttaatgaataaaccgatttatgcgtttcagttgaactttggtctctgcgaagggcgaattcgcggccgcta

SEQ ID NO: 156 - protein, 735 aa, Adeno-associated virus
MAADGYLPDWLEDTLSEGIRQWWKLKPGPPPPKPNQQHRDDSRGLVLPGYKYLGPFNGLDKGEPVNEADAAALEHDKAYDHQLKQGDNPYLKYNHADAEFQERLQEDTSFGGNLGRAVFQAKKRVLEPLGLVEEAVKTAPGKKRPIEQSPAEPDSSSGIGESGQQPAKKRLNFGQTGDTESVPDPQPIGEPPAAPSGVGSNTMASGGGAPMADDNEGADGVGNSSGNWHCDSTWMGDRVITTSTRTWALPTYNNHLYKQISSESGATNDNHYFGYSTPWGYFDFNRFHCHFSPRDWQRLINNNWGFRPKKLNFKLFNIQVKEVTQNDGTTTIANNLTSTVQVFTDSEYQLPYVLGSAHQGCLPPFPADVFMIPQYGYLTLNNGSQAVGRSSFYCLEYFPSQMLRTGNNFTFSYTFEDVPFHSSYAHSQSLDRLMNPLIDQYLYYLSKTQGTSGTTQQSRLQFSQAGPSSMAQQAKNWLPGPSYRQQRMSKTANDNNNSEFAWTAATKYYLNGRNSLVNPGPPMASHKDDEEKYFPMHGNLIFGKQGTGTTNVDIESVLITDEEEIRTTNPVATEQYGQVATNHQSQDTTASYGSVDSQGILPGMVWQDRDVYLQGPIWAKTPHTDGHFHPSPLMGGFGLKHPPPQILIKNTPVPANPATTFTPGKFASFITQYSTGQVSVEIEWELQKENSKRWNPEIQYTSNYNKSVNVEFTVDANGVYSEPRPIGTRYLTRNL

SEQ ID NO: 157 - DNA, 3113 bp, Adeno-associated virus
gaattcgccctttctacggctgcgtcaactggaccaatgaaaactttcccttcaacgattgcgtcgacaagatggtgatctggtgggaggagggaaagatgaccgccaaggtcgtggaatctgccaaagccattctgggtggaagcaaggttcgtgtggaccagaaatgcaagtcttcggcccagatcgacccgactccggtgattgtcacctctaacaccaacatgtgcgccgtgattgacggaaactcgaccaccttcgagcaccagcagccgttgcaagaccggatgttcaaatttgaacttacccgccgtttggatcatgactttgggaaggtcaccaagcaggaagtcaaagactttttccggtgggctcaagatcacgtgactgaggtggagcatgagttctacgtcaaaaagggtggagccaagaaaaggcccgcccccgatgatgtatatataaatgagcccaagcgggcgcgcgagtcagttgcgcagccatcgacgtcagacgcggaagcttcgataaactacgcggacaggtaccaaaacaaatgttctcgtcacgtgggcatgaatctgatgctgtttccctgtcgacaatgcgaaagaatgaatcagaattcaaatatctgcttcacacacgggcaaaaagactgtttggaatgctttcccgtgtcagaatctcaacccgttcctgtcgtcagaaaaacgtatcagaaactttgttacattcatcatatcatgggaaaagtaccagacgcctgcactgcctgcgacctggtaaatgtggacttggatgactgtatttctgagcaataaatgacttaaatcaggtatggctgctgacggttatcttccagattggctcgaggacactctctctgaaggaatcagacagtggtggaagctcaaacctggcccaccaccgccgaaacctaaccaacaacaccgggacgacagtaggggtcttgtgcttcctgggtacaagtacctcggacccttcaacggactcgacaaaggagagccggtcaacgaggcagacgccgcggccctcgagcacgacaaagcctacgaccaccagctcaagcaaggggacaacccgtacctcaaatacaaccacgcggacgctgaatttcaggagcgtcttcaagaagatacgtctttcgggggcaacctcgggcgagcagtcttccaggccaaaaagagggtactcgagcctcttggtctggttgaggaagctgttaagacggctcctggaaaaaagagacctatagagcagtctcctgcagaaccggactcttcctcgggcatcggcaaatcaggccagcagcccgctaagaaaagactcaattttggtcagactggcgacacagagtcagtcccagaccctcaaccaatcggagaaccccccgcagccccctctggtgtgggatctaatacaatggcttcaggcggtggggcaccaatggcagacaataacgaaggcgccgacggagtgggtaattcctcgggaaattggcattgcgattccacatggatgggcgacagagttatcaccaccagcacaagaacctgggccctccccacctacaataatcacctctacaagcaaatctccagcgaatcgggagccaccaacgacaaccactacttcggctacagcaccccctgggggtattttgactttaacagattccactgtcacttctcaccacgtgactggcagcgactcatcaataacaactggggatttagacccaagaaactcaatttcaagctcttcaacatccaagtcaaggaggtcacgcagaatgatggaaccacgaccatcgccaataaccttaccagcacggtgcaggtcttcacagactctgagtaccagctgccctacgtcctcggttcggctcaccagggctgccttccgccgttcccagcagacgtcttcatgattcctcagtacggctacttgactctgaacaatggcagccaagcggtaggacgttcttcattctactgtctagagtattttccctctcagatgctgaggacgggaaacaacttcaccttcagctacacttttgaagacgtgcctttccacagcagctacgcgcacagccagagtctggatcggctgatgaatcctctcattgaccagtacctgtattacctgagcaaaactcagggtacaagtggaacaacgcagcaatcgagactgcagttcaaccaagctgggcctagctccatggctcagcaggccaaaaactggctaccgggacccagctaccgacagcagcgaatgtctaagacggctaatgacaacaacaacagtgaatttgcttggactgcagccaccaaatattacccgaatggaagaaattctctggtcaatcccgggcccccaatggccagtcacaaggacgatgaggaaaagtatttccccatgcacggaaatctcatctttggaaaacaaggcacaggaactaccaatgtggacattgaatcagtgcttattacagacgaagaagaaatcagaacgactaatcctgtggctacagaacaatacggacaggttgccaccaaccgtcagagtcagaacaccacagcttcctatggaagtgtggacagccagggaatcttacctggaatggtgtggcaggaccgcgatgtctatcttcaaggtcccatttgggccaaaactcctcacacggacggacactttcatccttctccgctcatgggaggctttggactgaaacaccctcctccccagatcctgatcaaaaacacacctgtgccagcgaatcccgcgaccactttcactcctggaaagtttgcttcgttcattacccagtattccaccggacaggtcagcgtggaaatagagtgggagctgcagaaagaaaacagcaaacgctggaacccggaaattcagtacacctccaactacaacaagtcggtgaatgtggagtttaccgtggacgcaaacggtgtttattctgaaccccgccctattggcactcgttaccttacccggaacttgtaatttcctgttaatgaataaaccgatttatgcgtttcagttgaactttggtctctgcgaagggcgaattc

SEQ ID NO: 158 - protein, 735 aa, Adeno-associated virus
MAADGYLPDWLEDTLSEGIRQWWKLKPGPPPPKPNQQHRDDSRGLVLPGYKYLGPFNGLDKGEPVNEADAAALEHDKAYDHQLKQGDNPYLKYNHADAEFQERLQEDTSFGGNLGRAVFQAKKRVLEPLGLVEEAVKTAPGKKRPIEQSPAEPDSSSGIGKSGQQPAKKRLNFGQTGDTESVPDPQPIGEPPAAPSGVGSNTMASGGGAPMADNNEGADGVGNSSGNWHCDSTWMGDRVITTSTRTWALPTYNNHLYKQISSESGATNDNHYFGYSTPWGYFDFNRFHCHFSPRDWQRLINNNWGFRPKKLNFKLFNIQVKEVTQNDGTTTIANNLTSTVQVFTDSEYQLPYVLGSAHQGCLPPFPADVFMIPQYGYLTLNNGSQAVGRSSFYCLEYFPSQMLRTGNNFTFSYTFEDVPFHSSYAHSQSLDRLMNPLIDQYLYYLSKTQGTSGTTQQSRLQFNQAGPSSMAQQAKNWLPGPSYRQQRMSKTANDNNNSEFAWTAATKYYPNGRNSLVNPGPPMASHKDDEEKYFPMHGNLIFGKQGTGTTNVDIESVLITDEEEIRTTNPVATEQYGQVATNRQSQNTTASYGSVDSQGILPGMVWQDRDVYLQGPIWAKTPHTDGHFHPSPLMGGFGLKHPPPQILIKNTPVPANPATTFTPGKFASFITQYSTGQVSVEIEWELQKENSKRWNPEIQYTSNYNKSVNVEFTVDANGVYSEPRPIGTRYLTRNL

SEQ ID NO: 159 - DNA, 3122 bp, Adeno-associated virus
agcggccgcgaattcgccctttctacggctgcgtcaactggaccaatgaaaactttcccttcaacgattgcgtcgacaagatggtgatctggtgggaggagggaaagatgaccgccaaggtcgtggaatctgccaaagccattctgggtggaagcaaggttcgtgtggaccagaaatgcaggtcttcggcccagatcgacccgactccggtgattgtcacctctaacaccaacatgtgcgccgtgattgacggaaactcgaccaccttcgagcaccagcagccgttgcaagaccggatgttcaaatttgaacttacccgccgtttggatcatgactttgggaaggtcaccaagcaggaagtcaaagactttttccggtgggctcaagatcacgtgactgaggtggagcatgagttctacgtcaaaaagggtggagccaagaaaaggcccgcccccgatgatgtatatataaatgagcccaagcgggcgcgcgagtcagttgcgcagccatcgacgtcagacgcggaagcttcgataaactacgcggacaggtaccaaaacaaatgttctcgtcacgtgggcatgaatctgatgctgtttccctgtcgacaatgcgaaagaatgaatcagaattcaaatatctgcttcacacacgggcaaaaagactgtttggaatgctttcccgtgtcagaatctcaacccgtttctgtcgtcagaaaaacgtatcagaaactttgttacattcatcatatcatgggaaaagtaccagacgcctgcactgcctgcgacctggtaaatgtggacttggatgactgtatttctgagcaataaatgacttaaatcaggtatggctgctgacggttatcttccagattggctcgaggacactctctctgaaggaatcagacagtggtggaagctcaaacctggcccaccaccgccgaaacctaaccaacaacaccgggacgacagtaggggtcttgtgcttcctgggtacaagtacctcggacccttcaacggactcgacaaaggagagccggtcaacgaggcagacgccgcggccctcgagcacgacaaagcctacgaccaccagctcaagcaaggggacaacccgtacctcaaatacaaccacgcggacgctgaatttcaggagcgtcttcaagaagatacgtctttcgggggcaacctcgggcgagcagtcttccaggccaaaaagagggtactcgagcctcttggtctggttgaggaagctgttaagacggctcctggaaaaaagagacctatagagcagtctcctgcagaaccggactcttcctcgggcatcggcaaatcaggccagcagcccgctaagaaaagactcaattttggtcagactggcgacacagagtcagtcccagaccctcaaccaatcggagaaccccccgcagccccctctggtgtgggatctaatacaatggcttcaggcggtggggcaccaatggcagacaataacgaaggcgccgacggagtgggtaattcctcgggaaattggcattgcgattccacatggatgggcgacagagttatcaccaccagcacaagaacctgggccctccccacctacaataatcgcctctacaagcaaatctccagcgaatcgggagccaccaacgacaaccactacttcggctacagcaccccctgggggtattttgactttaacagattccactgtcacttctcaccacgtgactggcagcgactcatcaacaacaactggggatttagacccaagaaactcaatttcaagctcttcaacatccaagtcaaggaggtcacgcagaatgatggaaccacgaccatcgccaataaccttaccagcacggtgcaggtcttcacagactctgagtaccagctgccctacgtcctcggttcggctcaccagggctgccttccgccgttcccagcagacgtcttcatgattcctcagtacggctacttgactctgaacaatggcagccaagcggtaggacgttcttcattctactgtctagagtattttccctctcagatgctgaggacgggaaacaacttcaccttcagctacacttttgaagacgtgcctttccacagcagctacgcgcacagccagagtctggatcggctgatgaatcctctcattgaccagtacctgtattacctgagcaaaactcagggtacaagtggaacaacgcagcaatcgagactgcagttcagccaagctgggcctagctccatggctcagcaggccaaaaactggctaccgggacccagctaccgacagcagcgaatgtctaagacggctaatgacaacaacaacagtgaatttgcttggactgcagccaccaaatattacctgaatggaagaaattctctggtcaatcccgggcccccaatggccagtcacaaggacgatgaggaaaagtatttccccatgcacggaaatctcatctttggaaaacaaggcacaggaactaccaatgtggacattgaatcagtgcttattacagacgaagaagaaatcagaacaactaatcctgtggctacagaacaatacggacaggttgccaccaaccatcagagtcagaacaccacagcttcctatggaagtgtggacagccagggaatcttacctggaatggtgtggcaggaccgcgatgtctatcttcaaggtcccatttgggccaaaactcctcacacggacggacactttcatccttctccgctcatgggaggctttggactgaaacaccctcctccccagatcctgatcaaaaacacacctgtgccagcgaatcccgcgaccactttcactcctggaaagtttgcttcgttcattacccagtattccaccggacaggtcagcgtggaaatagagtgggagctgcagaaagaaaacagcaaacgctggaacccagaaattcagtacacctccaactacaacaagtcggtgaatgtggagtttaccgtggacgcaaacggtgtttattctgaaccccgccctattggcactcgttaccttacccggaacttgtaatttcctgttaatgaataaaccgatttatgcgtttcagttgaactttggtctctgcgaagggcgaattc

SEQ ID NO: 160 - protein, 735 aa, Adeno-associated virus
MAADGYLPDWLEDTLSEGIRQWWKLKPGPPPPKPNQQHRDDSRGLVLPGYKYLGPFNGLDKGEPVNEADAAALEHDKAYDHQLKQGDNPYLKYNHADAEFQERLQEDTSFGGNLGRAVFQAKKRVLEPLGLVEEAVKTAPGKKRPIEQSPAEPDSSSGIGKSGQQPAKKRLNFGQTGDTESVPDPQPIGEPPAAPSGVGSNTMASGGGAPMADNNEGADGVGNSSGNWHCDSTWMGDRVITTSTRTWALPTYNNRLYKQISSESGATNDNHYFGYSTPWGYFDFNRFHCHFSPRDWQRLINNNWGFRPKKLNFKLFNIQVKEVTQNDGTTTIANNLTSTVQVFTDSEYQLPYVLGSAHQGCLPPFPADVFMIPQYGYLTLNNGSQAVGRSSFYCLEYFPSQMLRTGNNFTFSYTFEDVPFHSSYAHSQSLDRLMNPLIDQYLYYLSKTQGTSGTTQQSRLQFSQAGPSSMAQQAKNWLPGPSYRQQRMSKTANDNNNSEFAWTAATKYYLNGRNSLVNPGPPMASHKDDEEKYFPMHGNLIFGKQGTGTTNVDIESVLITDEEEIRTTNPVATEQYGQVATNHQSQNTTASYGSVDSQGILPGMVWQDRDVYLQGPIWAKTPHTDGHFHPSPLMGGFGLKHPPPQILIKNTPVPANPATTFTPGKFASFITQYSTGQVSVEIEWELQKENSKRWNPEIQYTSNYNKSVNVEFTVDANGVYSEPRPIGTRYLTRNL

SEQ ID NO: 161 - DNA, 3121 bp, Adeno-associated virus
gaattcgcccttcgcagagaccaaagttcaactgaaacgaatcaaccggtttattgattaacaagcaattacagattacgggtgaggtaacgggtgccgatggggcgaggctcagaataagtgccatctgtgttaacagcaaagtccacatttgtagatttgtagtagttggaagtgtattgaatctctgggttccagcgtttgctgttttctttctgcagctcccattcaatttccacgctgacctgtccggtgctgtactgcgtgatgaacgacgccagcttagcttgactgaaggtagttggaggatccgcgggaacaggtgtattcttaatcaggatctgaggaggcgggtgtttcagtccaaagccccccatcagcggcgagggatgaaagtttccgtccgtgtgaggaatcttggcccagataggaccctgcaggtacacgtcccggttctgccagaccatgccaggtaaggctccttgactgttgacggcccctacaataggagcggcgttttgctgttgcaggttatcggccaccacgccgtactgttctgtggccactgggttggtggttttaatttcttcctcactggttagcataacgctgctatagtccacgttgccttttccagctccctgtttcccaaacattaagactccgctggacggaaaaaatcgctcttcgtcgtccttgtgggttgccatagcgacaccgggatttaccagagagtctctgccattcagatgatacttggtggcaccggtccaggcaaagttgctgttgttattttgcgacagtgtcgtggagacgcgttgctgccggtagcagggcccgggtagccagtttttggcctgagccgacatgttattaggcccggcctgagaaaatagcaactgctgagttcctgcggtacctcccgtggactgagtccgagacaggtagtacaggtactggtcgatgagggggttcatcagccggtccaggctttggctgtgcgcgtagctgctgtgaaaaggcacgtcctcaaactggtagctgaactcaaagttgttgcccgttctcagcatttgagaaggaaagtactccaggcagtagaaggaggaacggcccacggcctgactgccattgttcagagtcaggtacccgtactgaggaatcatgaagacgtccgccgggaacggaggcaggcagccctggcgcgcagagccgaggacgtacgggagctggtattccgagtccgtaaagacctgaatcgtgctggtaaggttattggcgatggtcttggtgccttcattctgcgtgacctccttgacctggatgttgaagagcttgaagttgagtctcttgggccggaatccccagttgttgttgatgagtcgctgccagtcacgtggtgagaagtggcagtggaatctgttaaagtcaaaatacccccagggggtgctgtagccgaagtaggtgttgtcgttggtgcttcctcccgaagtcccgttggagatttgcttgtagaggtggttgttgtaggtggggagggcccaggttcgggtgctggtggtgatgactctgtcgcccagccatgtggaatcgcaatgccaatttcctgaggaactacccactccgtcggcgccttcgttattgtctgccattggagcgccaccgcctgcagccattgtaccagatcccagaccagaggggcctgcggggggttctccgattggttgagggtcgggcactgactctgagtcgccagtctgcccaaagttgagtctctttttcgcgggctgctggcctttcttgccgatgcccgtagtggagtctggagaacgctggggtgatggctctaccggtctcttctttccaggagccgtcttagcgccttcctcaaccagaccgagaggttcgagaacccgcttcttggcctggaagactgctcgtccgaggttgcccccaaaagacgtatcttcttgcagacgctcctgaaactcggcgtcggcgtggttataccgcaggtacggattgtcacccgctttgagctgctggtcgtaggccttgtcgtgctcgagggccgctgcgtccgccgcgttgacgggctcccccttgtcgagtccgttgaagggtccgaggtacttgtagccaggaagcaccagaccccggccgtcgtcctgcttttgctggttggctttgggcttcggggctccaggtttcagcgcccaccactcgcgaatgccctcagagaggttgtcctcgagccaatctggaagataaccatcggcagccatacctgatctaaatcatttattgttcaaagatgcagtcatccaaatccacattgaccagatcgcaggcagtgcaagcgtctggcacctttcccatgatatgatgaatgtagcacagtttctgatacgcctttttgacgacagaaacgggttgagattctgacacgggaaagcactctaaacagtctttctgtccgtgagtgaagcagatatttgaattctgattcattctctcgcattgtctgcagggaaacagcatcagattcatgcccacgtgacgagaacatttgttttggtacctgtccgcgtagttgatcgaagcttccgcgtctgacgtcgatggctgcgcaactgactcgcgcacccgtttgggctcacttatatctgcgtcactgggggcgggtcttttcttggctccaccctttttgacgtagaattcatgctccacctcaaccacgtgatcctttgcccaccggaaaaagtctttgacttcctgcttggtgaccttcccaaagtcatgatccagacggcgggtgagttcaaatttgaacatccggtcttgcaacggctgctggtgttcgaaggtcgttgagttcccgtcaatcacggcgcacatgttggtgttggaggtgacgatcacgggagtcgggtctatctgggccgaggacttgcatttctggtccacgcgcaccttgcttcctccgagaatggctttggccgactccacgaccttggcggtcatcttcccctcctcccaccagatcaccatcttgtcgacacagtcgttgaagggaaagttctcattggtccagttgacgcagccgtagaagggcgaattc

SEQ ID NO: 162 - protein, 733 aa, Adeno-associated virus
MAADGYLPDWLEDNLSEGIREWWDLKPGAPKLKANQQKQDDGRGLVLPGYKYLGPFHGLDKGEPVNAADAAALEHDKAYDQQLKAGDNPYLRYNHADAEFQERLQEDTSFGGNLGRAVFQAKKRVLEPLGLVEEGAKTAPGKKRPLESPQEPDSSSGIGKKGKQPAKKRLNFEEDTGAGDGPPEGSDTSAMSSDIEMRAAPGGNAVDAGQGSDGVGNASGDWHCDSTWSEGKVTTTSTRTWVLPTYNNHLYLRLGTTSNSNTYNGFSTPWGYFDFNRFHCHFSPRDWQRLINNNWGLRPKAMRVKIFNIQVKEVTTSNGETTVANNLTSTVQIFADSSYELPYVMDAGQEGSLPPFPNDVFMVPQYGYCGIVTGENQNQTDRNAFYCLEYFPSQMLRTGNNFEMAYNFEKVPFHSMYAHSQSLDRLMNPLLDQYLWHLQSTTSGETLNQGNAATTFGKIRSGDFAFYRKNWLPGPCVKQQRFSKTASQNYKIPASGGNALLKYDTHYTLNNRWSNIAPGPPMATAGPSDGDFSNAQLIFPGPSVTGNTTTSANNLLFTSEGEIAATNPRDTDMFGQIADNNQNATTAPITGNVTAMGVLPGMVWQNRDIYYQGPIWAKIPHADGHFHPSPLIGGFGLKHPPPQIFIKNTPVPANPATTFTAARVDSFITQYSTGQVAVQIEWEIEKERSKRRNPEVQFTSNYGNQSSMLWAPDTTGKYTEPRVIGSRYLTNHL

SEQ ID NO: 163 - protein, 735 aa, Adeno-associated virus
MAADGYLPDWLEDTLSEGIRQWWKLKPGPPPPKPNQQHRDDSRGLVLPGYKYLGPFNGLDKGEPVNEADAAALEHDKAYDHQLKQGDNPYLKYNHADAEFQERLQEDTSFGGNLGRAVFQAKKRVLEPLGLVEEAVKTAPGKKRPIEQSPAEPDSSSGIGKSGQQPAKKRLNFGQTGDTESVPDPQPIGEPPAAPSGVGSNTMASGGGAPMADNNEGADGVGNSSGNWHCDSTWMGDRVITTSTRTWALPTYNNHLYKQISSESGATNDNHYFGYSTPWGYFDFNRFHCHFSPRDWQRLINNNWGFRPKKLNFKLFNIQVKEVTQNDGTTTIANNLTSTVQVFTDSEYQLPYVLGSAHQGCLPPFPADVFMIPQYGYLTLNNGSQAVGRSSFYCLEYFPSQMLRTGNNFTFSYTFEDVPFHSSYAHSQSLDRLMNPLIDQYLYYLSKTQGTSGTTQQSRLQFSQAGPSSMAQQAKNWLPGPSYRQQRMSKTANDNNNSEFAWTAATKYYLNGRNSLVNPGPPMASHKDDEEKYFPMHGNLIFGKQGTGTTNVDIESVLITDEEEIRTTNPVATEQYGQVATNHQSQNTTASYGSVDSQGILPGMVWQDRDVYLQGPIWAKIPHTDGHFHPSPLMGGFGLKHPPPQILIKNTPVPANPATTFTPGKFASFITQYSTGQVSVEIEWELQKENSKRWNPEIQYTSNYNKSVNVEFTVDANGVYSEPRPIGTRYLTRNL

SEQ ID NO: 164 - DNA, 3127 bp, Adeno-associated virus
gcggccgcgaattcgcccttcgcagagaccaaagttcaactgaaacgaatcaaccggtttattgattaacatgcaattacagattacgggtgaggtaacgagtgccaatagggcgaggctcagagtaaacaccctggctgtcaacggcaaagtccacaccagtctgcttttcaaagttggaggtgtactgaatctccgggtcccagcgcttgctgttttccttctgcagctcccactcgatttccacgctgacttgtccggtgctgtactgtgtgatgaacgaagcaaacttggcaggagtaaacacctccggaggattagcgggaacgggagtgttcttgatcaggatctgaggaggcggatgtttaagtccaaagccgcccatcaaaggagacgggtgaaagttgccatccgtgtgaggaatcttggcccagatgggaccctgcaggtacacgtcccggttctgccagaccatgccaggtaaggctccctggttgttgacaacttgtgtctgggctgcagtattagccgcttgtaagttgctgctgactatcccgtattcttccgtggctacaggattagtaggacgaatttcttcttcatttgtcattaacacattttccaatgtagttttgttagttgctccagtttttccaaaaatcaggactccgctggatgggaaaaagcggtcctcgtcgtccttgtgagttgccatggcgacgccgggattaaccaacgagtttctgccgttcaggtgatatttggtggcaccagtccaagcaaagttgctgttgttgttttgatccagcgttttggagaccctttgttgccggaagcagggtccaggtaaccaattcttggcttgttcggccatagttgaaggcccgccctggtaaaactgcagttcccgattgccagctgtgcctcctgggtcactctgtgttctggccaggtagtacaagtactggtcgatgaggggattcatcagccggtccaggctctggctgtgtgcgtagctgctgtggaaaggcacgtcctcgaagctgtagctgaactcaaagttgttgcccgttctcagcatctgagaggggaagtactccaggcagtagaaggaggaacgtcccacagactgactgccattgttgagagtcaggtagccgtactgaggaatcatgaagacgtccgccgggaacggaggcaggcagccctggtgcgcagagccgaggacgtacggcagctggtattccgagtccgagaatacctgaatcgtgctggtaaggttattagcgatggtcgtaacgccgtcattcgtcgtgacctccttgacctggatgttgaagagcttgaaccgcagcttcttgggccggaatccccagttgttgttgatgagtcgctgccagtcacgtggtgagaagtggcagtggaatctgttaaagtcaaaatacccccagggggtgctgtagccgaagtaggtgttgtcgttggtactacctgcagtttcactggagatttgctcgtagaggtggttgttgtaggtgggcagggcccaggttcgggtgctggtggtaatgactctgtcgcccagccatgtggaatcgcaatgccaatttcctgaggcattacccactccgtcggcaccttcgttattgtctgccattggtgcgccaccgcctgcagccactgtaccagatcccacactagagggcgctgctggaggttctccgagaggttgagggtcggggactgactctgagtcgccagtctgaccgaaattgagtctctttctggcgggctgctggcccttcttgccgatgcccgtggaggagtcgggggaacgctgaggtgacggctctaccggtctcttctttgcaggagccgtcttagcgccttcctcaaccagaccgagaggttcgagaacccgcttcttggcctggaagactgctcgcccgaggttgcccccaaatgacgtatcttcttgcagacgctcctgaaactcggcgtcggcgtggttataccgcaggtacgggttgtcacccgcattgagctgctggtcgtaggccttgtcgtgctcgagggccgctgcgtccgccgcgttgacgggctcccccttgtcgagtccgttgaagggtccgaggtacttgtagccaggaagcaccagaccccggccgttgtcctgcttttgctggttggctttgggtttcggggctccaggtttcaggtcccaccactcgcgaatgccctcagagaggttgtcctcgagccaatctggaagataaccatcggcagccatacctgatttaaatcatttattgttcaaagatgcagtcatccaaatccacattgaccagatcgcaggcagtgcaagcgtctggcacctttcccatgatatgatgaatgtagcacagtttctgatacgcctttttgacgacagaaacgggtttagattctgacacgggaaagcactctaaacagtctttctgtccgtgagtgaagcagatatttgaattctgattcattctctcgcattgtctgcagggaaacagcatcagattcatgcccacgtgacgagaacatttgttttggtacctgtctgcgtagttgatcgaagcttccgcgtctgacgtcgatggctgcgcaactgactcgcgcacccgtttgggctcacttatatctgcgtcactgggggcgggtcttttcttggctccaccctttttgacgtagaattcatgctccacctcaaccacgtaatcctttgcccaccggaaaaagtctttgacttcctgcttggtgaccttcccaaagtcatgatccagacggcgggtgagttcaaatttgaacatccggtcttgcaacggctgctggtgttcgaaggtcgttgagttcccgtcgatcacggcgcacatgttggtgttggagatgacgatcgcgggagtcgggtctatctgggccgaggacttgcatttctggtccacgcgcaccttgcttcctccgagaatggctttggccgactccacgaccttggcggtcatcttcccctcctcccaccagatcaccatcttgtcgacacagtcgttgaagggaaagttctcattggtccagttgacgcagccgtagaaagggcgaattc

SEQ ID NO: 165 - protein, 728 aa, Adeno-associated virus
MAADGYLPDWLEDNLSEGIREWWDLKPGAPKPKANQQKQDDGRGLVLPGYKYLRPFNGLDKGEPVNEADAAALEHDKAYDKQLEQGDNPYLKYNHADAEFQERLQEDTSFGGNLGRAVFQAKKRVLEPLGLVEEVAKTAPGKKRPIESPDSSTGIGKKGQQPAKKKLNFGQTGDSESVPDPQPLGEPPAAPSGLGSGTMAAGGGAPMADNNEGADGVGNASGNWHCDSTWLGDRVITTSTRTWALPTYNNHLYKQISSQSGATNDNHFFSYSTPWGYFDFNRFHCHFSPRDWQRLINNNWGFRPRKLRFKLFNIQVKEVTTNDGVTTIANNLTSTIQVFSDSEYQLPYVLGSAHQGCLPPFPADVFMIPQYGYLTLNNGSQSVGRSSFYCLEYFPSQMLRTGNNFEFSYTFEEVPFHSSYVHSQSLDRLMNPLIDQYLYYLARTQSTTGSTRELQFHQAGPNTMAEQSKNWLPGPCYRQQRLSKNIDSNNNSNFAWTGATKYHLNGRNSLTNPGVAMATNKDDEDQFFPINGVLVFGKTGAANKTTLENVLMTSEEEIKTTNPVATEEYGVVSSNLQSSTAGPQTQTVNSQGALPGMVWQNRDVCLQGPIWAKIPHTDGNFHPSPLMGGFGLKHPPPQILIKNTPVPANPPEVFTPAKFASFITQYSTGQVSVEIEWELQKENSKRWNPEIQYTSNYAKSNNVEFAVNNEGVYTEPRPIGTRYLTRNL

SEQ ID NO: 166 - DNA, 3106 bp, Adeno-associated virus
gcggccgcgaattcgcccttcgcagagaccaaagttcaactgaaacgaatcaaccggtttattgattaacaagtaattacaggttacgggtgaggtaacgggtgccaatggggcgaggctcagtataaaccccttcgttgttgacagcaaattccacattattagacttggcataatttgaggtgtactgaatctctggattccagcgtttgctgttttctttctgcagttcccactcgatctccacgctgacctggccggtgctgtactgcgtgataaatgaggcaaacttggcaggagtaaacacctctggaggattagcaggtaccggggtgtttttgatgagaatttgaggaggcgggtgtttgagtccaaatccgcccatcaggggagacgggtgaaagttgccgtccgtgtgaggaattttggcccagatgggaccctgcaggcacacgtcccggttctgccagaccatgccgggcagagccccctggctgttgacagtctgtgtctggggtccggccgtagacgattgcaggttgctggagaccacaccgtattcttctgtagccacgggattggtggttttgatctcctcctcgctggtcattagcacgttttccagcgttgtcttgttggcagcccccgttttgccaaaaaccagcactccgttgatgggaaagaactggtcctcgtcgtccttgttggtggccatggctacgcccgggttggttaatgaatttctaccattcagatggtatttagtggccccggtccaggcaaagttactgttgttgttgctgtctatgttttttgacagtctctgctgccgataacagggtccgggcagccagttctttgattgctcggccatggtgttgggcccagcctgatggaactgcagctcccttgtggaccccgtagtgctctgggtccgggccaggtagtacaggtactggtcgatgaggggattcatcagccggtctaggctctggctgtgcacatagctgctgtggaaaggcacttcctcaaaggtgtagctgaattcaaagttattgcccgttctcagcatctgagaaggaaagtactccaggcagtagaaggaggaacgtcccacagactgactgccgttgtttagagtcagatatccgtactgaggaatcatgaacacgtccgcagggaacggagggaggcagccctggtgcgcagagccgaggacgtacggcagttggtactccgagtccgagaagacctgaatcgtgctggtaaggttattagcgatggtcgtaacgccgtcgttcgtcgtgacctccttgacctggatgttgaacaacttgaaccgcagctttctgggccggaatccccagttgttgttgatgagtcgctgccagtcacgtggtgagaagtggcagtggaatctgttgaagtcaaaatagccccagggggtgctgtagctgaagaagtggttgtcgttggtagccccgctctgacttgatatctgcttgtagaggtggttgttgtaggtgggcagggcccaggtgcgggtgctggtggtgatgactctgtcgcccagccatgtggaatcgcaatgccaatttccggaggcattacccactccgtcggcgccttcgttattgtctgccattggtgcgccaccgcctgcagccattgtaccagatcccagacctgagggcgcggcgggaggttctccgagaggttgggggtcgggcactgactctgagtcgccagtctgcccaaagttgagcttctttttagcgggctgctggcctttcttgccgatgcccgtggaggagtcgggggattctatgggtctcttctttccaggagccgtcttagcgacttcctcaaccagaccgagaggttcgagaacccgcttcttggcctggaagactgctcgcccgaggttgcccccaaaagacgtatcttcttgaagacgctcctgaaactcggcgtcggcgtggttgtacttgaggtacgggttgtccccctgctcgagctgcttgtcgtaggccttgtcgtgctcgagggccgcggcgtctgcctcgttgaccggctctcccttgtcgagtccgttgaagggtctgaggtacttgtagccaggaagcaccagaccccggccgtcgtcctgcttttgctggttggctttgggtttcggggctccaggtttcaagtcccaccactcgcgaatgccctcagagaggttgtcctcgagccaatctggaagataaccatcggcagccatacctggtttaagtcatttattgctcagaaacacagtcatccaggtccacgttgaccagatcgcaggccgagcaagcaatctcgggagcccgccccagcagatgatgaatggcacagagtttccgatacgtcctctttctgacgaccggttgagattctgacacgccggggaaacattctgaacagtctctggtcccgtgcgtgaagcaaatgttgaaattctgattcactctctcgcatgtcttgcagggaaacagcatctgaagcatgcccgcgtgacgagaacatttgttttggtacctgtcggcaaagtccaccggagctccttccgcgtctgacgtcgatggattcgcgactgaggggcaggcccgcttgggctcgcttttatccgcgtcatcgggggcgggtctcttgttggccccaccctttctgacgtagaacccatgcgccacctcggtcacgtgatcctgcgcccagcggaagaaccttttgacttcctgctttgtcaccttgccaaagttatgctccagacggcgggtgggttcaaatttgaacatccggtcctgcaacggctgctggtgctcgaaggtggcgctgttcccgtcaatcacggcgcacatgttggtgttggaggtgacggtcacgggggtggggtcgatctgggcggacgacttgcacttttggtccacgcgcaccttgctgccgccgagaatggccttggcggactccacgaccttggccgtcatcttgccctcctcccaccagatcaccatcttgtcggcgcaatcgttgaagggaaagttctcattggtccagttgacgcagccgtagaaagggcgaattc

SEQ ID NO: 167 - protein, 728 aa, Adeno-associated virus
MAADGYLPDWLEDNLSEGIREWWDLKPGAPKPKANQQKQDDGRGLVLPGYKYLGPFNGLDKGEPVNEADAAALEHDKAYDKQLEQGDNPYLKYNHADAEFQERLQEDTSFGGNLGRAVFQAKKRVLEPLGLVEEGAKTASGKKRPIESPDSSTGIGKKGQQPAKKKLNFGQTGDSESVPDPQPLGEPPAAPSGLGSGTMAAGGGAPMADNNEGADGVGNASGNWHCDSTWLGDRVITTSTRTWALPTYNNHLYKQISSQSGATNDNHFFGYSTPWGYFDFNRFHCHFSPRDWQRLINNNWGFRPRKLRFKLFNIQVKEVTTNDGVTTIANNLTSTIQVFSDSEYQLPYVLGSAHQGCLPPFPADVFMIPQYGYLTLNNGSQSVGRSSFCCLEYFPSQMLRTGNNFEFSYTFEEVPFHSSYAHSQSLDRLMNPLIDQYLYYLARTQSTTGSTRELQFHQAGPNTVAEQSKNWLPGPCYRQQRLSKNIDSNNNSNFAWTGATKYHLNGRNSLTNPGVAMATNKDDEDQFLPINGVLVFGKTGAANKTTLENVLMTSEEEIKTTNPVATEEYGVVSSNLQSSTAGPRTQTVNSQGALPGMVWQNRDVYLQGPIWAEIPHTDGNFHPSPLMGGFGLKHPPPQILIKNTPVPANPPEVFTPAKFASFITQYSTGQVSVEIEWELQKENSKRWNPEIQYTSNYAKSNNVEFAVNNEGVYTEPRPIGTRYLTRNL

SEQ ID NO: 168 - DNA, 3102 bp, Adeno-associated virus
gcggccgcgaattcgcccttcgcagagaccaaagttcaactgaaacgaatcaaccggtttattgattaacaagtaattacaggttacgggtgaggtaacgggtgccaatggggcgaggctcagtataaaccccttcgttgttgacagcaaattccacattattagacttggcataatttgaggtgtactgaatctctggattccagcgtttgctgttttctttctgcagttcccactcgatctccacgctgacctggccggtgctgtactgcgtgataaatgaggcaaacttggcaggagtaaacacctctggaggattagcaggtaccggggtgtttttgatgagaatttgaggaggcgggtgtttgagtccaaatccgcccatcaggggagacgggtgaaagttgccgtccgtgtgaggaatttcggcccagatgggaccctgcaggtacacgtcccggttctgccagaccatgccgggcagagccccctggctgttgacagtctgtgtccggggtccggccgtagacgattgcaggttgctggagaccacaccgtattcttctgtagccacgggattggtggttttgatctcctcctcgctggtcattagcacgttttccagcgttgtcttgttggcagcccccgttttgccaaaaaccagcactccgttgatgggaaggaactggtcctcgtcgtccttgttggtggccatggctacgcccgggttggttaatgaatttctaccattcagatggtatttagtggccccggtccaggcaaagttactgttgttgttgctgtctatgttttttgacagtctctgctgccgataacagggtccgggcagccagttctttgattgctcggccacggtgttgggcccagcctgatggaactgcagctcccttgtggaccccgtagtgctctgggtccgggccaggtagtacaggtactggtcgatgaggggattcatcagccggtccaggctctggctgtgcgcatagctgctgtggaaaggcacttcctcaaaggtgtagctgaattcaaagttattgcccgttctcagcatctgagaaggaaagtactccaggcagcagaaggaggaacgtcccacagactgactgccgttgtttagagtcagatatccgtactgaggaatcatgaacacgtccgcagggaacggagggaggcagccctggtgcgcagagccgaggacgtacggcagttggtactccgagtccgagaagacctgaatcgtgctggtaaggttattagcgatggtcgtaacgccgtcgttcgtcgtgacctccttgacctggatgttgaacaacttgaaccgcagctttctgggccggaatccccagttgttgttgatgagtcgctgccagtcacgtggtgagaagtggcagtggaatctgttgaagtcaaaatagccccagggggtgctgtagccgaagaagtggttgtcgttggtagccccgctctgacttgatatctgcttgtagaggtggttgttgtaggtgggcagggcccaggtgcgggtgctggtggtgatgactctgtcgcccagccatgtggaatcgcaatgccaatttccggaggcattacccactccgtcggcgccttcgttattgtctgccattggtgcgccaccgcctgcagccattgtaccagatcccagacctgagggcgcggcgggaggttctccgagaggttgggggtcgggcactgactctgagtcgccagtctgcccaaagttgagcttctttttagcgggctgctggcctttcttgccgatgcccgtggaggagtcgggggattctatgggtctcttctttccggaagccgtcttagcgccttcctcaaccagaccgagaggttcgagaacccgcttcttggcctggaagactgctcgcccgaggttgcccccaaaagacgtatcttcttgaagacgctcctgaaactcggcgtcggcgtggttgtacttgaggtacgggttgtccccctgctcgagctgcttgtcgtaggccttgtcgtgctcgagggccgcggcgtctgcctcgttgaccggctctcccttgtcgagtccgttgaagggtccgaggtacttgtagccaggaagcaccagaccccggccgtcgtcctgcttttgctggttggctttgggtttcggggctccaggtttcaagtcccaccactcgcgaatgccctcagagaggttgtcctcgagccaatctggaagataaccatcggcagccatacctggtttaagtcatttattgctcagaaacacagtcatccaggtccacgttgaccagatcgcaggccgagcaagcaatctcgggagcccgccccagcagatgatgaatggcacagagtttccgatacgtcctctttctgacgaccggttgagattctgacacgccggggaaacattctgaacagtctctggtcccgtgcgtgaagcaaatgttgaaattctgattcattctctcgcatgtcttgcagggaaacagcatctgaagcatgcccgcgtgacgagaacatttgttttggtacctgtcggcaaagtccaccggagctccttccgcgtctgacgtcgatggatccgcgactgaggggcaagcccgcttgggctcgcttttatccgcgtcatcgggggcgggtctcttgttggctccaccctttctgacgtagaactcatgcgccacctcggtcacgtgatcctgcgcccagcggaagaactctttgacttcctgctttgtcaccttgccaaagtcatgctccagacggcgggtgagttcaaatttgaacatccggtcttgtaacggctgctggtgctcgaaggtggtgctgttcccgtcaatcacggcgcacatgttggtgttggaagtgacgatcacgggggtgggatcgatctgggcggacgacttgcacttttggtccacgcgcaccttgctgccgccgagaatggccttggcggactccacgaccttggccgtcatcttgccctcctcccaccagatcaccatcttgtcgacgcaatcgttgaagggaaagttctcattggtccagttgacgcagccgaagggcgaattc

SEQ ID NO: 169 - protein, 728 aa, Adeno-associated virus
MAADGYLPDWLEDNLSEGIREWWDLKPGAPKPKANQQKQDDGRGLVLPGYRYLGPFNGLDKGEPVNEADAAALEHDKAYDKQLEQGDNPYLKYNHADAEFQERLQEDTSFGGNLGRAVFQAKKRVLEPLGLVEEGAKTAPGKKRPIESPDSSTGIGKNGQPPAKKKLNFGQTGDSESVPDPQPLGEPPAAPSGLGSGTMAAGGGAPMADNNEGADGVGNASGNWHCDSTWLGDRVITTSTRTWALPTYNNHLYKQISSQSGATNDNHFFGYSTPWGYFDFNRFHCHFSPRDWQRLINNNWGFRPRKLRFKLFNIQVKEVTTNDGVTTIANNLTSTIQVFSDSEYQLPYVLGSAHQGCLPPFPADVFMIPQYGYLTLNNGSQSVGRSSFYCLEYFPSQMLRTGNNFEFSYTFEEVPFHSSYAHSQSLDRLMNPLIDQYLYYLARTQSTTGSTRELQFHQAGPNTMAEQSKNWLPGPCYRQQRLSKNIDSNNNSNFAWTGATKYHLNGRNSLTNPGVAMATNKDDEDQFFPINGVLVFGKTGAANKTTLENVLMTSEEEIKTTNPVATEEYGVVSSNLQSSTAGPQTQTVNSQGALPGMVWQNRDVYLQGPIWAKIPHTDGNFHPSPLMGGFGLKHPPPQILIKNTPVPANPPEVFTPAKFASFITQYSTGQVSVEIEWELQKENSKRWNPEIQYTSNYAKSNNVEFAVNNEGVYTEPRPIGTRYLTRNL

SEQ ID NO: 170 - protein, 728 aa, Adeno-associated virus
MAADGYLPDWLEGNLSEGIREWWDLKPGAPKPKANQQKQDDGRGLVLPGYRYLGPFNGLDKGEPVNEADAAALEHDKAYDKQLEQGDNPYLKYNHADAEFQERLQEDTSFGGNLGRAVFQAKKRVLEPLGLVEEGAKTAPGKKRPIESPDSSTGIGKNGQPPAKKKLNFGQTGDSESVPDPQPLGEPPAAPSGLGSGTMAAGGGAPMADNNEGADGVGNASGNWHCDSTWLGDRVITTSTRTWALPTYNNHLYKQISSQSGATNDNHFFGYSTPWGYFDFNRFHCHFSPRDWQRLINNNWGFRPRKLRFKLFNIQVKEVTTNDGVTTIANNLTSTIQVFSDSEYQLPYVLGSAHQGCLPPFPADVFMIPQYGYLTLNNGSQSVGRSSFYCLEYFPSQMLRTGDNFEFSYTFEEVPFHSSYAHSQSLDRLMNPLIDQYLYYLARTQSTTGSTRELQFHQAGPNTMAEQSKNWLPGPCYRQQRLSKNIDSNNNSNFAWTGATKYHLNGRNSLTNPGVAMATNKDDEDQFFPINGVLVFGKTGAANKTTLENVLMTSEEEIKTTNPVATEEYGVVSSNLQSSTAGPQTQTVNSQGALPGMVWQNRDVYLQGPIWAKIPHTDGNFHPSPLMGGFGLKHPPPQILIKNTPVPANPPEVFTPAKFASFITQYSTGQVSVEIEWELQKENSKRWNPEIQYTSNYAKSNNVEFAVNNEGVYTEPRPIGTRYLTRNL

SEQ ID NO: 171 - DNA, 3106 bp, Adeno-associated virus
gcggccgcgaattcgcccttcgcagagaccaaagttcaactgaaacgaatcagccggtttattgattaacaagtaattacaggttacgggtgaggtaacgggtgccaatggggcgaggctcagtataaaccccttcgttgttgacagcaaattccacattattagacttggcataatttgaggtgtactgaatctctggattccagcgtttgctgttttctttctgcagttcccactcgatctccacgctgacctggccggtgctgtactgcgtgataaatgaggcaaacttggcaggagtaaacacctctggaggattagcaggtaccggggtgtttttgatgagaatttgaggaggcgggtgtttgagtccaaatccgcccatcaggggagacgggtgaaagttgccgtccgtgtgaggaattttggcccagatgggaccctgcaggtacacgtcccggttctgccagaccatgccgggcagagccccctggctgttgacagtctgtgtctggggtccggccgtagacgattgcaggttgctggagaccacaccgtattcttctgtagccacgggattggtggttttgatctcctcctcgctggtcattagcacgttttccagcgttgtcttgttggcagcccccgttttgccaaaaaccagcactccgttgatgggaaagaactggtcctcgtcgtccttgttggtggccatggctacgcccgggttggttaatgaatttctaccattcagatggtatttagtggccccggtccaggcaaagttactgttgttgttgctgtctatgttttttgacagtctctgctgccgataacagggtccgggcagccagttctttgattgctcggccatggtgttgggcccagcctgatggaactgcagctcccttgtggaccccgtagtgctctgggtccgggccaggtagtacaggtactggtcgatgaggggattcatcagccggtccaggctctggctgtgcgcatagctgctgtggaaaggcacttcctcaaaggtgtagctgaattcaaagttatcgcccgttctcagcatctgagaaggaaagtactccaggcagtagaaggaggaacgtcccacagactgactgccgttgtttagagtcagatatccgtactgaggaatcatgaacacgtccgcagggaacggagggaggcagccctggtgcgcagagccgaggacgtacggcagttggtactccgagtccgagaagacctgaatcgtgctggtaaggttattagcgatggtcgtaacgccgtcgttcgtcgtgacctccttgacctggatgttgaacaacttgaaccgcagctttctgggccggaatccccagttgttgttgatgagtcgctgccagtcacgtggtgagaagtggcagtggaatctgttgaagtcaaaatagccccagggggtgctgtagccgaagaagtggttgtcgttggtagccccgctctgacttgatatctgcttgtagaggtggttgttgtaggtgggcagggcccaggtgcgggtgctggtggtgatgactctgtcgcccagccatgtggaatcgcaatgccaatttccggaggcattacccactccgtcggcgccttcgttattgtctgccattggtgcgccaccgcctgcagccattgtaccagatcccagacctgagggcgcggcgggaggttctccgagaggttgggggtcgggcactgactctgagtcgccagtctgcccaaagttgagcttctttttagcgggcggctggccgttcttgccgatgcccgtggaggagtcgggggattctatgggtctcttctttccaggagccgtcttagcgccttcctcaaccagaccgagaggttcgagaacccgcttcttggcctggaagactgctcgcccgaggttgcccccaaaagacgtatcttcttgaagacgctcctgaaactcggcgtcggcgtggttgtacttgaggtacgggttgtccccctgctcgagctgcttgtcgtaggccttgtcgtgctcgagggccgcggcgtctgcctcgttgaccggctctcccttgtcgagtccgttgaagggtccgaggtacctgtagccaggaagcaccagaccccggccgtcgtcctgcttttgctggttggctttgggtttcggggctccaggtttcaagtcccaccactcgcgaatgccctcagagaggttgccctcgagccaatctggaagataaccatcggcagccatacctggtttaagtcatttattgctcagaaacacagtcatccaggtccacgttggccagatcgcaggccgagcaagcaatctcgggagcccgccccagcagatgatgaatggcacagagtttccgatacgtcctctttctgacgaccggttgagattctgacacgccggggaaacattctgaacagtctctggtcccgtgcgtgaagcaaatgttgaaattctgattcattctctcgcatgtcttgcaggggaacagcatctgaagcatgcccgcgtgacgagaacatttgttttggtacctgtcggcaaagtccaccggagctccttccgcgtctgacgtcgatggatccgcgactgaggggcaggcccgcttgggctcgcttttatccgcgtcatcgggggcgggtctcttgttggctccaccctttctgacgtagaactcatacgccacctcggtcacgtgatcctgcgcccagcggaagaactctttgacttcctgctttgtcaccttgccaaagtcatgctccagacggcgggtgagttcaaatttgaacatccggtcttgtaacggctgctggtgctcgaaggtggtgctgttcccgtcaatcacggcgcacatgttggtgttggaagtgacgatcacgggggtgggatcgatctgggcggacgacttgcacttttggtccacgcgcaccttgctgccgccgagaatggccttggcggactccacgaccttggccgtcatcctgccctcctcccaccagatcaccatcttgtcgacgcaatcgttgaagggaaagttctcattggtccagttgacgcagccgtagaaagggcgaattc

SEQ ID NO: 172 - protein, 728 aa, Adeno-associated virus
MAADGYLPDWLEDNLSEGIREWWDLKPGAPKPKANQQKQDDGRGLVLPGYKYLGPFNGLDKGEPVNEADAAALEHDKAYDKQLEQGDNPYLKYNHADAEFQERLQEDTSFGGNLGRAVFQAKKRVLEPLGLVEEGAKTAPGKKRPIESPDSSTGIGKKGQQPAKKKLNFGQTGDSESVPDPQPLGEPPAAPSGLGSGTMAAGGGAPMADNNEGADGVGNASGNWHCDSTWLGDRVITTSTRTWALPTYNNHLYKQISSQSGATNDNHFFGYSTPWGYFDFNRFHCHFSPRDWQRLINNNWGFRPRKLRFKLFNIQVKEVTTNDGVTTIANNLTSTIQVFSDSEYQLPYVLGSAHQGCLPPFPADVFMIPQYGYLTLNNGSQSMGRSSFYCLEYFPSQMLRTGNNFEFSYTFEEVPFHSSYAHSQSLDRLMNPLIDQYLYYLARTQSTTGSTRELQFHQAGPNTMAEQSKNWLPGPCYRQQRLSKNIDSNNNSNFAWTGATKYHLNGRNSLTNPGVAMATNKDDEGQFFPINGVLVFGKTGAANKTTLENVLMTSEEEIKTTNPVATEEYGVVSSNLQSSTAGPQTQTVNSQGALPGMVWQNRDVYLQGPIWAKIPHTDGNFHPSPLMGGFGLKHPPPQILIKNTPVPANPPGVFTPALFASFITQYSTGQVSVEIEWELQKENSKRWNPEIQYTSNYAKSNNVEFAVNNEGVYTEPRPIGTRYLTRNL

SEQ ID NO: 173 - DNA, 3098 bp, Adeno-associated virus
gaattcgcccttcgcagagaccaaagttcaactgaaacgaatcaaccggtttattgattaacaagtaattacaggttacgggtgaggtaacgggtgccaatggggcgaggctcagtataaaccccttcgttgttgacagcaaattccacattattagacttggcataatttgaggtgtactgaatctctggattccagcgtttgctgttttctttctgcagttcccactcgatctccacgctgacctggccggtgctgtactgcgtgataaatgaggcaaactaggcaggagtaaacacccctggaggattagcaggtaccggggtgtttttgatgagaatttgaggaggcgggtgtttgagtccaaatccgcccatcaggggagacgggtgaaagttgccgtccgtgtgaggaattttggcccagatgggaccctgcaggtacacgtcccggttctgccagaccatgccgggcagagccccctggctgttgacagtctgtgtctggggtccggccgtagacgattgcaggttgctggagaccacaccgtattcttctgtagccacgggattggtggttttgatctcctcctcgctggtcattagcacgttttccagcgttgtcttgttggcagcccccgttttgccaaaaaccagcactccgttgatgggaaagaactggccctcgtcgtccttgttggtggccatggctacgcccgggttggttaatgaatttctaccattcagatggtatttagtggccccggtccaggcaaagttactgttgttgttgctgtctatgttttttgacagtctctgctgccgataacagggtccgggcagccagttctttgattgctcggccatggtgttgggcccagcctgatggaactgcagctcccttgtggaccccgtagtgctctgggtccgggccaggtagtacaggtactggtcgatgaggggattcatcagccggtccaggctctggctgtgcgcatagctgctgtggaaaggcacttcctcaaaggtgtagctgaattcaaagttattgcccgttctcagcatctgagaaggaaagtactccaggcagtagaaggaggaacgtcccatagactgactgccgttgtttagagtcagatatccgtactgaggaatcatgaacacgtccgcagggaacggagggaggcagccctggtgcgcagagccgaggacgtacggcagttggtactccgagtccgagaagacctgaatcgtgctggtaaggttattagcgatggtcgtaacgccgtcgttcgtcgtgacctccttgacctggatgttgaacaacttgaaccgcagctttctgggccggaatccccagttgttgttgatgagtcgctgccagtcacgtggtgagaagtggcagtggaatctgttgaagtcaaaatagccccagggggtgctgtagccgaagaagtggttgtcgttggtagccccgctctgacttgatatctgcttgtagaggtggttgttgtaggtgggcagggcccaggtgcgggtgctggtggtgatgactctgtcgcccagccatgtggaatcgcaatgccaatttccggaggcattacccactccgtcggcgccttcgttattgtctgccattggtgcgccaccgcctgcagccattgtaccagatcccagacctgagggcgcggcgggaggttctccgagaggttgggggtcgggcactgactctgagtcgccagtctgcccaaagttgagcttctttttagcgggctgctggcctttcttgccgatgcccgtggaggagtcgggggattctatgggtctcttctttccaggagccgtcttagcgccttcctcaaccagaccgagaggttcgagaacccgcttcttggcctggaagactgctcgcccgaggttgcccccaaaagacgtatcttcttgaagacgctcctgaaactcagcgtcggcgtggttgtacttgaggtacgggttgtccccctgctcgagctgcttgtcgtaggccttgtcgtgctcgagggccgcggcgtctgcctcgttgaccggctctcccttgtcgagtccgttgaagggtccgaggtacttgtagccaggaagcaccagaccccggccgtcgtcctgcttttgctggttggctttgggtttcggggctccaggtttcaagtcccaccactcgcgaatgccctcagagaggttgtcctcgagccaatctggaagataaccatcggcagccatacctggtttaagtcatttattgctcagaaacacagtcatccaggtccacgttgaccagatcgcaggccgagcaagcaatctcgggagcccgccccagcagatgatgaatggcacagagtttccgatacgtcctctttctgacgaccggttgagattctgacacgccggggaaacattctgaacagtctctggtcccgtgcgtgaagcaaatgttgaaattctgattcattctctcgcatgtcttgcagggaaacagcatctgaagcatgcccgcgtgacgagaacatttgttttggtacctgtcggcaaagtccaccggagctccttccgcgtctgacgtcgatggatccgcgactgaggggcaggcccgcttgggctcgcttttatccgcgtcatcgggggcgggcctcttgttggctccaccctttctgacgtagaactcatgcgccacctcggtcacgtgatcctgcgcccagcggaagaactctttgacttcctgctttgtcaccttgccaaagtcctgctccagacggcgggtgagttcaaatttgaacatccggtcttgtaacggctgctggtgctcgaaggtggtgctgttcccgtcaatcacggcgcacatgttggtgttggaagtgacgatcacgggggtgggatcgatctgggcggacgacttgcacttttggtccacgcgcaccttgctgccgccgagaatggccttggcggactccacgaccttggccgtcatcttgccctcctcccaccagatcaccatcttgtcgacgcaatcgttgaagggaaagttctcattggtccagttgacgcagccgtagaaagggcgaattc

SEQ ID NO: 174 - DNA, 2187 bp, Adeno-associated virus
atggctgccgatggttatcttccagattggctcgagggcaacctctctgagggcattcgcgagtggtgggacttgaaacctggagccccgaaacccaaagccaaccagcaaaagcaggacgacggccggggtctggtgcttcctggctacaggtacctcggacccttcaacggactcgacaagggagagccggtcaacgaggcagacgccgcggccctcgagcacgacaaggcctacgacaagcagctcgagcagggggacaacccgtacctcaagtacaaccacgccgacgccgagtttcaggagcgtcttcaagaagatacgtcttttgggggcaacctcgggcgagcagtcttccaggccaagaagcgggttctcgaacctctcggtctggttgaggaaggcgctaagacggctcctggaaagaagagacccatagaatcccccgactcctccacgggcatcggcaagaacggccagccgcccgctaaaaagaagctcaactttgggcagactggcgactcagagtcagtgcccgacccccaacctctcggagaacctcccgccgcgccctcaggtctgggatctggtacaatggctgcaggcggtggcgcaccaatggcagacaataacgaaggcgccgacggagtgggtaatgcctccggaaattggcattgcgattccacatggctgggcgacagagtcatcaccaccagcacccgcacctgggccctgcccacctacaacaaccacctctacaagcagatatcaagtcagagcggggctaccaacgacaaccacttcttcggctacagcaccccctggggctattttgacttcaacagattccactgccacttctcaccacgtgactggcagcgactcatcaacaacaactggggattccggcccagaaagctgcggttcaagttgttcaacatccaggtcaaggaggtcacgacgaacgacggcgttacgaccatcgctaataaccttaccagcacgattcaggtcttctcggactcggagtaccaactgccgtacgtcctcggctctgcgcaccagggctgcctccctccgttccctgcggacgtgttcatgattcctcagtacggatatctgactctaaacaacggcagtcagtctgtgggacgttcctccttctactgcctggagtactttccttctcagatgctgagaacgggcgataactttgaattcagctacacctttgaggaagtgcctttccacagcagctatgcgcacagccagagcctggaccggctgatgaatcccctcatcgaccagtacctgtactacctggcccggacccagagcactacggggtccacaagggagctgcagttccatcaggctgggcccaacaccatggccgagcaatcaaagaactggctgcccggaccctgttatcggcagcagagactgtcaaaaaacatagacagcaacaacaacagtaactttgcctggaccggggccactaaataccatctgaatggtagaaattcattaaccaacccgggcgtagccatggccaccaacaaggacgacgaggaccagttctttcccatcaacggagtgctggtttttggcaaaacgggggctgccaacaagacaacgctggaaaacgtgctaatgaccagcgaggaggagatcaaaaccaccaatcccgtggctacagaagaatacggtgtggtctccagcaacctgcaatcgtctacggccggaccccagacacagactgtcaacagccagggggctctgcccggcatggtctggcagaaccgggacgtgtacctgcagggtcccatctgggccaaaattcctcacacggacggcaactttcacccgtctcccctgatgggcggatttggactcaaacacccgcctcctcaaattctcatcaaaaacaccccggtacctgctaatcctccagaggtgtttactcctgccaagtttgcctcatttatcacgcagtacagcaccggccaggtcagcgtggagatcgagtgggaactgcagaaagaaaacagcaaacgctggaatccagagattcagtacacctcaaattatgccaagtctaataatgtggaatttgctgtcaacaacgaaggggtttatactgagcctcgccccattggcacccgttacctcacccgtaacctgtaa

SEQ ID NO: 175 - protein, 728 aa, Adeno-associated virus; identical to SEQ ID NO: 170

SEQ ID NO: 176 - protein, 728 aa, Adeno-associated virus
MAADGYLPDWLEDNLSEGIREWWDLKPGAPKPKANQQKQDDGRGLVLPGYRYLGPFNGLDKGEPVNEADAAALEHDKAYDKQLEQGDNPYLKYNHADAEFQERLQEDTSFGGNLGRAVFQAKKRVLEPLGLVEEGAKTAPGKKRPIESPDSSTGIGKNGQPPAKKKLNFGQTGDSESVPDPQPLGEPPAAPSGLGSGTMAAGGGAPMADNNEGADGVGNASGNWHCDSTWLGDRVITTSTRTWALPTYNNHLYKQISSQSGATNDNHFFGYSTPWGYFDFNRFHCHFSPRDWQRLINNNWGFRPRKLRFKLFNIQVKEVTTNDGVTTIANNLTSTIQVFSDSEYQLPYVLGSAHQGCLPPFPADVFMIPQYGYLTLNNGSQSVGRSSFYCLEYFPSQMLRTGDNFEFSYTFEEVPFHSSYAHSQSLDRLMNPLIDQYLYYLARTQSTTGSTRELQFHQAGPNTMAEQSKNWLPGPCYRQQRLSKNIDSNNNSNFAWTGATKYHLNGRNSLTNPGVAMATNKDDEDQFFPINGVLVFGKTGAANKTTLENVLMTSEEEIKTTNPVATEEYGVVSSNLQSSTAGPQTQTVNSQGALPGMVWQNRDVYLQGPIWAKIPHTDGNFHPSPLMGGFGLKHPPPQILIKNTPVPANPPEVFTPAKFASFITQYSTGQVSVEIEWELQKENSKRWNPEIQYTSNYAKSNNVEFAVNNEGVYTEPRPIGTRYLTRNL

SEQ ID NO: 177 - protein, 728 aa, Adeno-associated virus; identical to SEQ ID NO: 169

SEQ ID NO: 178 - protein, 728 aa, Adeno-associated virus
MAADGYLPDWLEDNLSEGIREWWDLKPGAPKPKANQQKQDDGRGLVLPGYKYLGPFNGLDKGEPVNEADAAALEHDKAYDKQLEQGDNPYLKYNHADAEFQERLQEDTSFGGNLGRAVFQAKKRVLEPLGLVEEGAKTAPGKKRPIESPDSSTGIGKNGQPPAKKKLNFGQTGDSESVPDPQPLGEPPAAPSGLGSGTMAAGGGAPMADNNEGADGVGNASGNWHCDSTWLGDRVITTSTRTWALPTYNNHLYKQISSQSGATNDNHFFGYSTPWGYFDFNRFHCHFSPRDWQRLINNNWGFRPRKLRFKLFNIQVKEVTTNDGVTTIANNLTSTIQVFSDSEYQLPYVLGSAHQGCLPPFPADVFMIPQYGYLTLNNGSQSVGRSSFYCLEYFPSQMLRTGNNFEFSYTFEEVPFHSSYAHSQSLDRLMNPLIDQYLYYLARTQSTTGSTRELQFHQAGPNTMAEQSKNWLPGPCYRQQRLSKNIDSNNNSNFAWTGATKYHLNGRNSLTNPGVAMATNKDDEDQFFPINGVLVFGKTGAANKTTLENVLMTSEEEIKTTNPVATEEYGVVSSNLQSSTAGPQTQTVNSQGALPGMVWQNRDVYLQGPIWAKIPHTDGNFHPSPLMGGFGLKHPPPQILIKNTPVPANPPEVFTPAKFASFITQYSTGQVSVEIEWELQKENSKRWNPEIQYTSNYAKSNNVEFAVNNEGVYTEPRPIGTRYLTRNL

SEQ ID NO: 179 - protein, 728 aa, Adeno-associated virus
MAADGYLPDWLEDNLSEGIREWWDLKPGAPKPKANQQKQDDGRGLVLPGYKYLGPFNGLDKGEPVNEADAAALEHDKAYDKQLEQGDNPYLKYNHADAEFQERLQEDTSFGGNLGRAVFQAKKRVLEPLGLVEEGAKTAPGKKRPIESPDSSTGIGKKGQQPAKKKLNFGQTGDSESVPDPQPLGEPPAAPSGLGSGTMAAGGGAPMADNNEGADGVGNASGNWHCDSTWLGDRVITTSTRTWALPTYNNHLYKQISSQSGATNDNHFFGYSTPWGYFDFNRFHCHFSPRDWQRLINNNWGFRPRKLRFKLFNIQVKEVTTNDGVTTIANNLTSTIQVFSDSEYQLPYVLGSAHQGCLPPFPADVFMIPQYGYLTLNNGSQSVGRSSFYCLEYFPSQMLRTGNNFEFSYTFEEVPFHSSYAHSQSLDRLMNPLIDQYLYYLARTQSTTGSTRELQFHQAGPNTMAEQSKNWLPGPCYRQQRLSKNIDSNNNSNFAWTGATKYHLNGRNSLTNPGVAMATNKDDEDQFFPINGVLVFGKTGAANKTTLENVLMTSEEEIKTTNPVATEEYGVVSSNLQSSTAGPQTQTVNSQGALPGMVWQNRDVYLQGPIWAKIPHTDGNFHPSPLMGGFGLKHPPPQILIKNTPVPANPPEVFTPAKFASFITQYSTGQVSVEIEWELQKENSKRWNPEIQYTSNYAKSNNVEFAVNNEGVYTEPRPIGTRYLTRNL

SEQ ID NO: 180 - DNA, 2215 bp, Artificial Sequence
  Description of Artificial Sequence: Synthetic polynucleotide
atggctgccgatggttatcttccagattggctcgaggacactctctctgaaggaataagacagtggtggaagctcaaacctggcccaccaccaccaaagcccgcagagcggcataaggacgacagcaggggtcttgtgcttcctgggtacaagtacctcggacccttcaacggactcgacaagggagagccggtcaacgaggcagacgccgcggccctcgagcacgacaaagcctacgaccggcagctcgacagcggagacaacccgtacctcaagtacaaccacgccgacgccgagttccaggagcggctcaaagaagatacgtcttttgggggcaacctcgggcgagcagtcttccaggccaaaaagaggcttcttgaacctcttggtctggttgaggaagcggctaagacggctcctggaaagaagaggcctgtagagcactctcctgtggagccagactcctcctcgggaaccggaaaggcgggccagcagcctgcaagaaaaagattgaattttggtcagactggagacgcagactcagtcccagaccctcaaccaatcggagaacctcccgcagccccctcaggtgtgggatctcttacaatggctgcaggcggtggcgcaccaatggcagacaataacgagggcgccgacggagtgggtaattcctcgggaaattggcattgcgattccacatggatgggcgacagagtcatcaccaccagcacccgaacctgggccctgcccacctacaacaaccacctctacaagcaaatctccaacagcacatctggaggatcttcaaatgacaacgcctacttcggctacagcaccccctgggggtattttgactttaacagattccactgccacttttcaccacgtgactggcagcgactcatcaacaacaactggggattccggcccaagagactcagcttcaagctcttcaacatccaggtcaaggaggtcacgcagaatgaaggcaccaagaccatcgccaataacctcaccagcaccatccaggtgtttacggactcggagtaccagctgccgtacgttctcggctctgcccaccagggctgcctgcctccgttcccggcggacgtgttcatgattccccagtacggctacctaacactcaacaacggtagtcaggccgtgggacgctcctccttctactgcctggaatactttccttcgcagatgctgagaaccggcaacaacttccagtttacttacaccttcgaggacgtgcctttccacagcagctacgcccacagccagagcttggaccggctgatgaatcctctgattgaccagtacctgtactacttgtctcggactcaaacaacaggaggcacgacaaatacgcagactctgggcttcagccaaggtgggcctaatacaatggccaatcaggcaaagaactggctgccaggaccctgttaccgccagcagcgagtatcaaagacatctgcggataacaacaacagtgaatactcgtggactggagctaccaagtaccacctcaatggcagagactctctggtgaatccgggcccggccatggcaagccacaaggacgatgaagaaaagtttttttcctcagagcggggttctcatctttgggaagcaaggctcagagaaaacaaatgtggacattgaaaaggtcatgattacagacgaagaggaaatcaggacaaccaatcccgtggctacggagcagtatggttctgtatctaccaacctccagagaggcaacagacaagcagctaccgcagatgtcaacacacaaggcgttcttccaggcatggtctggcaggacagagatgtgtaccttcaggggcccatctgggcaaagattccacacacggacggacattttcacccctctcccctcatgggtggattcggacttaaacaccctccgcctcagatcctgatcaagaacacgcctgtacctgcggatcctccgaccaccttcaaccagtcaaagctgaactctttcatcacccagtattctactggccaagtcagcgtggagatcgagtgggagctgcagaaggaaaacagcaagcgctggaaccccgagatccagtacacctccaactactacaaatctacaagtgtggactttgctgttaatacagaaggcgtgtactctgaaccccgccccattggcacccgttacctcacccgtaatctgtaa

SEQ ID NO: 181 - protein, 737 aa, Artificial Sequence
  Description of Artificial Sequence: Synthetic polypeptide
MAADGYLPDWLEDTLSEGIRQWWKLKPGPPPPKPAERHKDDSRGLVLPGYKYLGPFNGLDKGEPVNEADAAALEHDKAYDRQLDSGDNPYLKYNHADAEFQERLKEDTSFGGNLGRAVFQAKKRLLEPLGLVEEAAKTAPGKKRPVEHSPVEPDSSSGTGKAGQQPARKRLNFGQTGDADSVPDPQPIGEPPAAPSGVGSLTMAAGGGAPMADNNEGADGVGNSSGNWHCDSTWMGDRVITTSTRTWALPTYNNHLYKQISNSTSGGSSNDNAYFGYSTPWGYFDFNRFHCHFSPRDWQRLINNNWGFRPKRLSFKLFNIQVKEVTQNEGTKTIANNLTSTIQVFTDSEYQLPYVLGSAHQGCLPPFPADVFMIPQYGYLTLNNGSQAVGRSSFYCLEYFPSQMLKTGNNFQFTYTFEDVPFHSSYAHSQSLDRLMNPLIDQYLYYLSRTQTTGGTTNTQTLGFSQGGPNTMANQAKNWLPGPCYRQQRVSKTSADNNNSEYSWTGATKYHLNGRDSLVNPGPAMASHKDDEEKFFPQSGVLIFGKQGSEKTNVDIEKVMITDEEEIRTTNPVATEQYGSVSTNLQRGNRQAATADVNTQGVLPGMVWQDRDVYLQGPIWAKIPHTDGHFHPSPLMGGFGLKHPPPQILIKNTPVPADPPTTFNQSKLNSFITQYSTGQVSVEIEWELQKENSKRWNPEIQYTSNYYKSTSVDFAVNTEGVYSEPRPIGTRYLTRNL

SEQ ID NO: 182 - protein, 737 aa, Artificial Sequence
  Description of Artificial Sequence: Synthetic polypeptide
MAADGYLPDWLEDTLSEGIRQWWKLKPGPPPPKPAERHKDDSRGLVLPGYKYLGPFNGLDKGEPVNEADAAALEHDKAYDRQLDSGDNPYLKYNHADAEFQERLKEDTSFGGNLGRAVFQAKKRLLEPLGLVEEAAKTAPGKKRPVEHSPVEPDSSSGTGKAGQQPARKRLNFGQTGDADSVPDPQPIGEPPAAPSGVGSLTMAAGGGAPMADNNEGADGVGNSSGNWHCDSTWMGDRVITTSTRTWALPTYNNHLYKQISNSTSGGSSNDNAYFGYSTPWGYFDFNRFHCHFSPRDWQRLINNNWGFRPKRLSFKLFNIQVKEVTQNEGTKTIANNLTSTIQVFTDSEYQLPYVLGSAHQGCLPPFPADVFMIPQYGYLTLNNGSQAVGRSSFYCLEYFPSQMLKTGNNFQFTYTFEDVPFHSSYAHSQSLDRLMNPLIDQYLYYLSRTQTTGGTTNTQTLGFSQGGPNTMANQAKNWLPGPCYRQQRVSKTSADNNNSEYSWTGATKYHLNGRDSLVNPGPAMASHKDDEEKFFPQSGVLIFGKQGSEKTNVDIEKVMITDEEEIRTTNPVATEQYGSVSTNLQQGNTQAATADVNTQGVLPGMVWQDRDVYLQGPIWAKIPHTDGHFHPSPLMGGFGLKHPPPQILIKNTPVPADPPTTFNQSKLNSFITQYSTGQVSVEIEWELQKENSKRWNPEIQYTSNYYKSTSVDFAVNTEGVYSEPRPIGTRYLTRNL

SEQ ID NO: 183 - protein, 737 aa, Artificial Sequence
  Description of Artificial Sequence: Synthetic polypeptide
MAADGYLPDWLEDTLSEGIRQWWKLKPGPPPPKPAERHKDDSRGLVLPGYKYLGPFNGLDKGEPVNEADAAALEHDKAYDRQLDSGDNPYLKYNHADAEFQERLKEDTSFGGNLGRAVFQAKKRLLEPLGLVEEAAKTAPGKKRPVEHSPVEPDSSSGTGKAGQQPARKRLNFGQTGDADSVPDPQPIGEPPAAPSGVGSLTMAAGGGAPMADNNEGADGVGNSSGNWHCDSTWMGDRVITTSTRTWALPTYNNHLYKQISNSTSGGSSNDNAYFGYSTPWGYFDFNRFHCHFSPRDWQRLINNNWGFRPKRLSFKLFNIQVKEVTQNEGTKTIANNLTSTIQVFTDSEYQLPYVLGSAHQGCLPPFPADVFMIPQYGYLTLNNGSQAVGRSSFYCLEYFPSQMLRTGNNFQFTYTFEDVPFHSSYAHSQSLDRLMNPLIDQYLYYLSRTQTTGGTTNTQTLGFSQGGPNTMANQAKNWLPGPCYRQQRVSKTSADNNNSEYSWTGATKYHLNGRDSLVNPGPAMASHKDDEEKFFPQSGVLIFGKQGSEKTNVDIEKVMITDEEEIRTTNPVATEQYGSVSTNLQQGNTQAATADVNTQGVLPGMVWQDRDVYLQGPIWAKIPHTDGHFHPSPLMGGFGLKHPPPQILIKNTPVPADPPTTFNQSKLNSFITQYSTGQVSVEIEWELQKENSKRWNPEIQYTSNYYKSTSVDFAVNTEGVYSEPRPIGTRYLTRNL

SEQ ID NO: 184 - protein, 729 aa, Adeno-associated virus
MAADGYLPDWLEDNLSEGIREWWDLKPGAPKPKANQQKQDDGRGLVLPGYKYLGPFNGLDKGEPVNAADAAALEHDKAYDQQLKAGDNPYLRYNHADAEFQERLQEDTSFGGNLGRAVFQAKKRVLEPLGLVEEGAKTAPGKKRPIDSPDSSTGIGKKGQQPAKKKLNFGQTGDSESVPDPQPLGEPPAAPSSVGSGTMAAGGGAPTADNNEGADGVGNASGNWHCDSTWLGDRVITTSTRTWALPTYNNHLYKQISSSSSGATNDNHYFGYSTPWGYFDFNRFHCHFSPRDWQRLINNNWGFRPKKLRFKLFNIQVKEVTTNDGVTTIANNLTSTVQVFSDSEYQLPYVLGSAHQGCLPPFPADVFMIPQYGYLTLNNGSQSVGRSSFYCLEYFPSQMLRTGNNFEFSYSFEDVPFHSSYAHSQSLDRLMNPLIDQYLYYLARTQSTTGSTRELQFHQAGPNTMAEQSKNWLPGPCYRQQRLSKNLDFNNNSNFAWTAATKYHLNGRNSLTNPGIPMATNKDDEDQFFPINGVLVFGKTGAANKTTLENVLMTSEEEIKTTNPVATEEYGVVSSNLQSSTAGPQSQTINSQGALPGMVWQNRDVYLQGPIWAKIPHTDGNFHPSPLMGGFGLEHPPPQILIKNTPVPANPPEVFTPAKFASFITQYSTGQVSVEIEWELQKENSKRWNPEIQYTSNYAKSNNVEFAVNPDGVYTEPRPIGTRYLTRNL

SEQ ID NO: 185 - DNA, 3075 bp, Adeno-associated virus
tgagaactttcctttcaacgattgcgtcggacaagatggtgatctggtgggaggaggggaagatgaccgccaaggtcgtggagtcggccaaagccattcttggaggaagcaaggtgcgtgtggaccagaaatgcaagtcctcggcccagatagacccgactcccgtgatcgtcacctccaacaccaacatgtgcgccgtgattgacgggaactcaacgaccttcgagcaccagcagccgttgcaagaccggatgttcaaatttgaacttacccgccgtctggatcatgactttggaaaggtcaccaagcaggaagtgaaagactttttccggtgggcaaaggatcacgtggttgaggtggagcatgaattctacgtcaaaaagggtggagctaagaaaagacccgcccccagtgacgcagatataagtgagcccaaacgggcgcgcgagtcagttgcgcagccatcaacgtcagacgcggaagcttcgatcaactacgcggacaggtaccaaaaacaaatgttctcgtcacgtgggcatgaatctgatgctgtttccctgcagacaatgcgagagaatgaatcagaattcaaatatctgcttcactcacggacagaaagactgtttagagtgctttcccgtgtcagaatctcaacccgtttctgtcgtcaaaaaggcgtatcagaaactgtgctacattcatcatatcatgggaaaggtgccagacgcttgcactgcctgcgatctggtcaatgtggatttggatgactgcatctctgaacaataaatgatttaaatcaggtatggctgccgatggttatcctccagattggctcgaggacactctctctgaagggataagacagtggtggaagctcaaacctggcccaccaccaccaaagcccgcagagcggcataaggacgacagcaggggtcttgtgcttcctgggtacaagtacctcggacccttcaacggactcgacaagggggagccggtcaacgaggcagacgccgcggccctcgagcacgacaaggcctacgaccggcagctcgacagcggagacaacccgtacctcaagtacaaccacgccgacgcagagtttcaggagcgccttaaagaagatacgtcttttgggggcaacctcggacgagcagtcttccaggcgaaaaagagggttcttgaacctctgggcctggttgaggaacctgttaagacggctccgggaaaaaagaggccggtagagcactctcctgtggagccagactcctcctcgggaaccggaaaagcgggccagcggcctgcaagaaaaagattaaattttggtcagactggagacgcagactccgtacctgacccccagcctctcggacagccaccagcagccccctctggtctgggatctactacaatggctacaggcagtggcgcaccaatggcagacaataacgagggtgccgatggagtgggtaattcctcaggaaattggcattgcgattcccaatggctgggcgacagagtcatcaccaccagcacccgaacctgggccctgcccacatacaacaaccacctctacaagcaaatctccagccaatcaggagccagcaacgacaaccactactttggctacagcaccccctgggggtattttgacttcaacagattccactgccacttttcaccacgtgactggcaaagactcatcaacaacaactggggattccggcccaaaagactcaacttcaagctctttaatattcaagtcaaagaggtcacgcagaatgacggtacgacgacgattgccaataaccttaccagcacggttcaggtgtttactgactcggagtaccagctcccgtacgtcctgggctcggcgcatcaaggatgcctcccgccgtttccagcggacgtcttcatggtcccacagtatggatacctcaccctgaacaacgggagtcaggcggtaggacgctcttccttttactgcctggagtactttccttctcagatgctgcgtactggaaacaactttcagttcagctacacttttgaagacgtgcctttccacagcagctacgctcacagccagagtctggatcggctgatgaatcctctgatcgaccagtacctgtattatctgaacaagacacaaacaaatagtggaactcttcagcagtctcggctactgtttagccaagctggaccaaccaacatgtctcttcaagctaaaaactggctgcctggaccttgctacagacagcagcgtctgtcaaaacaggcaaacgacaacaacaacagcaactttccctggactgcagctacaaagtatcatctaaatggccgggactcgttggttaatccaggaccagctatggccagtcacaaggatgacgaagaaaagtttttccccatgcatggaaccctgatatttggtaaacaaggaacaaatgccaacgacgcggatttggaaaatgtcatgattacagatgaagaagaaatcagggccaccaatcccgtggctacggagcagtacgggactgtgtcaaataatttgcaaaactcaaacactggtccaactactggaactgtcaatcgccaaggagcgttacctggtatggtgtggcaggatcgagacgtgtacctgcagggacccatttgggccaagattcctcacaccgatggacactttcatccttctccactgatgggaggttttggactcaaacacccgcctcctcagatcatgatcaaaaacactcccgttccagccaatcctcccacaaacttcagttctgccaagtttgcttctttcatcacacagtattccacgggacaggtcagcgtggagatcgagtgggagctgcagaaggagaacagcaaacgctggaatcccgaaattcagtacacttccaactacaacaagtctgttaatgtggactttactgtggacactaatggtgtgtattcagagcctcgccccattggcaccagatacctgactcgtaatctgtaattgcttgttaatcaataaaccgtttaattcgtttcagttgaactttggtctctgcgaagggcgaa

SEQ ID NO: 186 - DNA, 3142 bp, Adeno-associated virus
aaaacgacgggccagtgattgtaatacgactcactatagggcgaaattgaaattagcggccgcgaattcgcctttcgcagagaccaaagttcaactgaaacgaattaaacggtttattgattaacaagcaattacagattacgagtcaggtatctggtgccaatggggcgaggctctgaatacacaccattagtgtccacagtaaagtccacattaacagacttgttgtagttggaagtgtactgaatttcgggattccagcgtttgctgttctccttctgcagctcccactcgatctccacgctgacctgtcccgtggaatactgtgtgatgaaagaagcaaacttggcagaactgaagtttgtgggaggattggctggaacgggagtgtttttgatcatgatctgaggaggcgggtgtttgagtccaaaacctcccatcagtggagaaggatgaaagtgtccatcggtgtgaggaatcttggcccaaatgggtccctgcaggtacacgtctcgatcctgccacaccataccaggtaacgctccttggtgattgacagttccagtagttggaccagtgtttgagttttgcaaattatttgacacagtcccgtactgctccgtagccacgggattggtggccctgatttcttcttcatctgtaatcatgacattttccaaatccgcgtcgttggcatttgttccttgtttaccaaatatcagggttccatgcatggggaaaaacttttcttcgtcatccttgtgactggccatagctggtcctggattaaccaacgagtcccggccatttagatgatactttgtagctgcagtccagggaaagttgctgttgttgttgtcgtttgcctgttttgacagacgctgctgtctgtagcaaggtccaggcagccagtttttagcttgaagagacatgttggttggtccagcttggctaaacagtagccgagactgctgaagagttccactatttgtttgtgtcttgttcagataatacaggtactggtcgatcagaggattcatcagccgatccagactctggctgtgagcgtagctgctgtggaaaggcacgtcttcaaaagtgtagctgaactgaaagttgtttccagtacgcagcatctgagaaggaaagtactccaggcagtaaaaggaagagcgtcctaccgcctgactcccgttgttcagggtgaggtatccatactgtgggaccatgaagacgtccgctggaaacggcgggaggcatccttgatgcgccgagcccaggacgtacgggagctggtactccgagtcagtaaacacctgaaccgtgctggtaaggttattggcaatcgtcgtcgtaccgtcattctgcgtgacctctttgacttgaatattaaagagcttgaagttgagtcttttgggccggaatccccggttgttgttgacgagtctttgccagtcacgtggtgaaaagtggcagtggaatctgttgaagtcaaaatacccccagggggtgctgtagccaaagtagtggttgtcgttgctggctcctgattggctggagatttgcttgtagaggtggttgttgtatgtgggcagggcccaggttcgggtgctggtggtgatgactctgtcgcccagccattgggaatcgcaatgccaatttcctgaggaattacccactccatcggcaccctcgttattgtctgccattggtgcgccactgcctgtagccattgtagtagatcccagaccagagggggctgctggtggctgtccgagaggctgggggtcaggtacggagtctgcgtctccagtctgaccaaaatttaatctttttcttgcaggctgctggcccgcttttccggttcccgaggaggagtctggctccacaggagagtgctctaccggcctcttttttcccggagccgtcttaacaggctcctcaaccaggcccagaggttcaagaaccctctttttcgcctggaagactgctcgtccgaggttgcccccaaaagacgtatcttctttaaggcgctcctgaaactctgcgtcggcgtggttgtacttgaggtacgggttgtctccgctgtcgagctgccggtcgtaggccttgtcgtgctcgagggccgcggcgtctgcctcgttgaccggctcccccttgtcgagtccgttgaagggtccgaggtacttgtacccaggaagcacaagacccctgctgtcgtccttatgccgctctgcgggctttggtggtggtgggccaggtttgagcttccaccactgtcttattccttcagagagagtgtcctcgagccaatctggaagataaccatcggcagccatacctgatttaaatcatttattgttcagagatgcagtcatccaaatccacattgaccagatcgcaggcagtgcaagcgtctggcacctttcccatgatatgatgaatgtagcacagtttctgatacgcctttttgacgacagaaacgggttgagattctgacacgggaaagcactctaaacagtctttctgtccgtgagtgaagcagatatttgaattctgattcattctctcgcattgtctgcagggaaacagcatcagattcatgcccacgtgacgagaacatttgttttggtacctgtccgcgtagttgatcgaagcttccgcgtctgacgtcgatggctgcgcaactgactcgcgcgcccgtttgggctcacttatatctgcgtcactgggggcgggtcttttcttagctccaccctttttgacgtagaattcatgctccacctcaaccacgtgatcctttgcccaccggaaaaagtctttcacttcctgcttggtgacctttccaaagtcatgatccagacggcgggtaagttcaaatttgaacatccggtcttgcaacggctgctggtgctcgaaggtcgttgagttcccgtcaatcacggcgcacatgttggtgttggaggtgacgatcacgggagtcgggtctatctgggccgaggacttgcatttctggtccacacgcaccttgcttcctccaagaatggctttggccgactccacgaccttggcggtcatcttcccctcctcccaccagatcaccatcttgtcgacgcaatggtaaaaggaaagttctcattgg

SEQ ID NO: 187 - protein, 735 aa, Adeno-associated virus 2
MAADGYLPDWLEDTLSEGIRQWWKLKPGPPPPKPAERHKDDSRGLVLPGYKYLGPFNGLDKGEPVNEADAAALEHDKAYDRQLDSGDNPYLKYNHADAEFQERLKEDTSFGGNLGRAVFQAKKRVLEPLGLVEEPVKTAPGKKRPVEHSPVEPDSSSGTGKAGQQPARKRLNFGQTGDADSVPDPQPLGEPPATPAAVGPTTMASGGGAPMADNNEGADGVGNASGNWHCDSTWLGDRVITTSTRTWALPTYNNHLYKQISSASTGASNDNHYFGYSTPWGYFDFNRFHCHFSPRDWQRLINNNWGFRPKRLNFKLFNIQVKEVTQNDGTTTIANNLTSTVQVFTDSEYQLPYVLGSAHQGCLPPFPADVFMIPQYGYLTLNNGSQAVGRSSFYCLEYFPSQMLRTGNNFTFSYTFEDVPFHSSYAHSQSLDRLMNPLIDQYLYYLNRTQNQSGSAQDKALLFSRGSPAGMSVQPKNWLPGPCYRQQRVSKTKTDNNNSNFTWTGASKYNLNGRESIINPGTAMASHKDDKDKFFPMSGVMIFGKESAGASNTALDNVMITDEEEIKATNPVATERFGTVAVNFQSSSTDPATGDVHVMGALPGMVWQDRDVYLQGPIWAKIPHTDGHFHPSPLMGGFGLKHPPPQILIKNTPVPANPPAEFSATKFASFITQYSTGQVSVEIEWELQKENSKRWNPEVQYTSNYAKSANVDFTVDNNGLYTEPRPIGTRYLTRP

SEQ ID NO: 188 - protein, 740 aa, Adeno-associated virus 2
MAADGYLPDWLEDTLSEGIRQWWKLKPGPPPPKPAERHKDDSRGLVLPGYKYLGPFNGLDKGEPVNAADAAALEHDKAYDRQLDSGDNPYLKYNHADAEFQERLKEDTSFGGNLGRAVFQAKKRVLEPLGLVEEPVKTAPGKKRPVEHSPVEPDSSSGTGKAGQQPARKRLNFGQTGDADSVPDPQPLGQPPAAPSGLGTNTMATGSGAPMADNNEGADGVGNSSGNWHCDSTWMGDRVITTSTRTWALPTYNNHLYKQISSQSGASNDNHYFGYSTPWGYFDFNRFHCHFSPRDWQRLINNNWGFRPKRLNFKLFNIQVKEVTQNDGTTTIANNLTSTVQVFTDSEYQLPYVLGSAHQGCLPPFPADVFMVPQYGYLTLNNGSQAVGRSSFYCLEYFPSQMLRTGNNFTFSYTFEDVPFHSSYAHSQSLDRLMNPLIDQYLYYLSRTNTPSGTTTQSGLQFSQAGASDIRDQSRNWLPGPCYRQQRVSKTSADNNNSEYSWTGATKYHLNGRDSLVNPGPAMASHKDDEEKFFPQSGVLIFGKQGSEKTNVDIEKVMITDEEEIRTTNPVATEQYGSVSTNLQRGNRQAATADVNTQGVLPGMVWQDRDVYLQGPIWAKIPHTDGHFHPSPLMGGFGLKHPPPQILIKNTPVPANPSTTFSAAKFASFITQYSTGQVSVEIEWELQKENSKRWNPEIQYTSNYNKSVNVDFTVDTNGVYSEPRPIGTRYLTRNLLLAAA

SEQ ID NO: 189 - protein, 734 aa, Adeno-associated virus 2
MAADGYLPDWLEDTLSEGIRQWWKLKPGPPPPKPAERHKDDSRGLVLPGYKYLGPFNGLDKGEPVNEADAAALEHDKAYDRQLDSGDNPYLKYNHADAEFQERLKEDTSFGGNLGRAVFQAKKRVLEPLGLVEEPVKTAPGKKRPVEHSPVEPDSSSGTGKAGQQPARKRLNFGQTGDADSVPDPQPLGQPPAAPSGLGTNTMATGSGAPMADNNEGADGVGNSSGNWHCDSTWMGDRVITTSTRTWALPTYNNHLYKQISSQSGASNDNHYFGYSTPWGYFDFNRFHCHFSPRDWQRLINNNWGFRPKRLNFKLFNIQVKEVTQNDGTTTIANNLTSTVQVFTDSEYQLPYVLGSAHQGCLPPFPADVFMVPQYGYLTLNNGSQAVGRSSFYCLEYFPSQMLRTGNNFTFSYTFEDVPFHSSYAHSQSLDRLMNPLIDQYLYYLSRTNTPSGTTTQSGLQFSQAGASDIRDQSRNWLPGPCYRQQRVSKTSADNNNSEYSWTGATMYHLNGRDSLVNPGPAMASHKDDEEKFFPQSGVLIFGKQGSEKTNVDIEKVMITDEEEIRTTNPVATEQYGSVSTNLQRGNRQAATADVNTQGVLPGMVWQDRDVYLQGPIWAKIPHTDGHFHPSPLMGGFGLKHPPPQILIKNTPVPANPSTTFSAAKFASFITQYSTGQVSVEIEWELQKENSKRWNPEIQYTSNYNKSINVDFTVDTNGVYSEPRPIGTRYLTRN

SEQ ID NO: 190 - protein, 734 aa, Adeno-associated virus 2
MAADGYLPDWLEDTLSEGIRQWWKLKPGPPPPKPAERHKDDSRGLVLPGYKYLGPFNGLDKGEPVNEADAAALEHDKAYDRQLDSGDNPYLKYNHADAEFQERLKEDTSFGGNLGRAVFQAKKRVLEPLGLVEEPVKTAPGKKRPVEHSPVEPDSSSGTGKAGQQPARKRLNFGQTGDADSVPDPQPLGQPPAAPSGLGTNTMATGSGAPMADNNEGADGVGNSSGNWHCDSTWMGDRVITTSTRTWALPTYNNHLYKQISSQSGASNDNHYFGYSTPWGYFDFNRFHCHFSPRDWQRLINNNWGFRPKRLNFKLFNIQVKEVTQNDGTTTIANNLTSTVQVFTDSEYQLPYVLGSAHQGCLPPFPADVFMVPQYGYLTLNNGSQAVGRSSFYCLEYFPSQMLRTGNNFTFSYTFEDVPFHSSYAHSQSLDRLMNPLIDQYLYYLSRTNTPSGTTTQSGLQFSQAGASDIRDQSRNWLPGPCYRQQRVSKTSADNNNSEYSWTGATKYHLNGRDSLVNPGPAMASHKDDEEKFFPQSGVLIFGKQGSEKTNVDIEKVMITDEEEIRTTNPVATEQYGSVSTNLQRGNRQAATADVNTQGVLPGMVWQDRDVYLQGPIWAKIPHTDGHFHPSPLMGGFGLKHPPPQILIKNTPVPANPSTTFSEAKFASFITQYSTGQVSVEIEWELQKENSKRWNPEIQYTSNYNKSVNVDFTVDTNGVYSEPRPIGTRYLTRN

SEQ ID NO: 191 - protein, 739 aa, Adeno-associated virus 2
MAADGYLPDWLEDTLSEGIRQWWKLKPGPPPPKPAERHKDDSRGLVLPGYKYLGPFNGLDKGEPVNEADAAALEHDKAYDRQLDSGDNPYLKYNHADAEFQERLKEDTSFGGNLGRAVFQAKKRVLEPLGLVEEPVKTAPGKKRPVEHSPVEPDSSSGTGKAGQQPARKRLNFGQTGDADSVPDPQPLGQPPAAPSGLGTNTMATGSGAPMADNNEGADGVGNSSGNWHCDSTWMGDRVITTSTRTWALPTYNNHLYKQISSQSGASNDNHYFGYSTPWGYFDFNRFHCHFSPRDWQRLINNNWGFRPKRLNFKLFNIQVKEVTQNDGTTTIANNLTSTVQVFTDSEYQLPYVLGSAHQGCLPPFPADVFMVPQYGYLTLNNGSQAVGRSSFYCLEYFPSQMLRTGNNFTFSYTFEDVPFHSSYAHSQSLDRLMNPLIDQYLYYLSRTNTPSGTTTQSGLQFSQAGASDIRDQSRNWLPGPCYRQQRVSKTSADNNNSEYSWTGATKYHLNGRDSLVNPGPAMASHKDDEEKFFPQSGVLIFGKQGSEKTNVDIEKVMITDEEEIRTTNPVATEQYGSVSTNLQRGNRQAATADVNTQGVLPGMVWQDRDVYLQGPIWAKIPHTDGHFHPSPLMGGFGLKHPPPQILIKNTPVPANPSTTFSAAKFASFITQYSTGQVSVEIEWELQKENSKRWNPEIQYTSNYNKSVNVDFTVDTNGVYSEPRPIGTRYLTRNLLLAA

SEQ ID NO: 192 - protein, 725 aa, Adeno-associated virus 2
MAADGYLPDWLEDTLSEGIRQWWKLKPGPPPPKPAERHKDDSRGLVLPGYKYLGPFNGLDKGEPVNEADAAALEHDKAYDRQLDSGDNPYLKYNHADAEFQERLKEDTSFGGNLGRAVFQAKKRVLEPLGLVEEPVKTAPGKKRPVEHSPVEPDSSSGTGKAGQQPARKRLNFGQTGDADSVPDPQPLGQPPAAPSGLGTNTMATGSGAPMADNNEGADGVGNSSGNWHCDSTWMGDRVITTSTRTWALPTYNNHLYKQISSQSGASNDNHYFGYSTPWGYFDFNRFHCHFSPRDWQRLINNNWGFRPKRLNFKLFNIQVKEVTQNDGTTTIANNLTSTVQVFTDSEYQLPYVLGSAHQGCLPPFPADVFMVPQYGYLTLNNGSQAVGRSSFYCLEYFPSQMLRTGNNFTFSYTFEDVPFHSSYAHSQSLDRLMNPLIDQYLYYLSRTNTPSGTTTQSGLQFSQAGASDIRDQSRNWLPGPCYRQQRVSKTSADNNNSEYSWTGATKYHLNGRDSLVNPGPAMASHKDDEEKFFPQSGVLIFGKQGSEKTNVDIEKVMITDEEEIRTTNPVATEQYGSVSTNLQRGNRQAATADVNTQGVLPGMVWQDRDVYLQGPIWAKIPHTDGHFHPSPLMGGFGLKHPPPQILIKNTPVPANPSTTFSAAKFASFITQYSTGQVSVEIEWELQKENSKRWNPEIQYTSNYNKSVNVDFTVDTNGVYSEPRP

SEQ ID NO: 193 - protein, 707 aa, Adeno-associated virus 2
MAADGYLPDWLEDTLSEGIRQWWKLKPGPPPPKPAERHKDDSRGLVLPGYKYLGPFNGLDKGEPVNEADAAALEHDKAYDRQLDSGDNPYLKYNHADAEFQERLKEDTSFGGNLGRAVFQAKKRVLEPLGLVEEPVKTAPGKKRPVEHSPVEPDSSSGTGKAGQQPARKRLNFGQTGDADSVPDPQPLGQPPAAPSGLGTNTMATGSGAPMADNNEGADGVGNSSGNWHCDSTWMGDRVITTSTRTWALPTYNNHLYKQISSQSGASNDNHYFGYSTPWGYFDFNRFHCHFSPRDWQRLINNNWGFRPKRLNFKLFNIQVKEVTQNDGTTTIANNLTSTVQVFTDSEYQLPYVLGSAHQGCLPPFPADVFMVPQYGYLTLNNGSQAVGRSSFYCLEYFPSQMLRTGNNFTFSYTFEDVPFHSSYAHSQSLDRLMNPLIDQYLYYLSRTNTPSGTTTQSGLQFSQAGASDIRDQSRNWLPGPCYRQQRVSKTSADNNNSEYSWTGATKYHLNGRDSLVNPGPAMASHKDDEEKFFPQSGVLIFGKQGSEKTNVDIEKVMITDEEEIRTTNPVATEQYGSCIYQPPERQQTSSYRRCQHTRRSSRHGLAGQRCVPSGAHLGKDSTHGRTFSPLSPHGWIRTTPSSTDSHQEHPGTCESFDHLQCGKVCFLHHTVLHGTGQRGDRVRAAEGKQQTLESRNSVHFQLQQVC

SEQ ID NO: 194 - protein, 739 aa, Adeno-associated virus 2; identical to SEQ ID NO: 191

SEQ ID NO: 195 - protein, 737 aa, Adeno-associated virus 2
MASDGYLPDWLEDNLSEGIREWWDLKPGAPKPKANQQKQDDGRGLVLPGYKYLGPFNGLDKGEPVNAADAAALEHDKAYDQQLKAGDNPYLRYNHADAEFQERLQEDTSFGGNLGRAVFQAKKRVLEPFGLVEEGAKTAPGKKRPVEQSPQEPDSSSGIGKTGQQPAKKRLNFGQTGDSESVPDPQPLGEPPATPAAVGPTTMASGGGAPMADNNEGADGVGNASGNWHCDSTWLGDRVITTSTRTWALPTYNNHLYKQISSASTGASNDNHYFGYSTPWGYFDFNRFHCHFSPRDWQRLINNNWGFRPKRLNFKLFNIQVKEVTTNDGTTTIANNLTSTVQVFTDSEYQLPYVLGSAHQGCLPPFPADVFMVPQYGYLTLNNGSQAVGRSSFYCLEYFPSQMLRTGNNFTFSYTFEDVPFHSSYAHSQSLDRLMNPLIDQYLYYLSRTNTPSGTTTQSGLQFSQAGASDIRDQSRNWLPGPCYRQQRVSKTSADNNNSEYSWTGATKYHLNGRDSLVNPGPAMASHKDDEEKFFPQSGVLIFGKQGSEKTNVDIEKVMITDEEEIRTTNPVATEQYGSVSTNLQRGNRQAATADVNTQGVLPGMVWQDRDVYLQGPIWAKIPHTDGHFHPSPLMGGFGLKHHPPQILIKNTPVPANPSTTFSAAKFASFITQYSTGQVSVEIEWELQKENSKRWNPEIQYTSNYNKSVNVDFTVDTNGVYSEPRPIGTRYLTRNLL

SEQ ID NO: 196 - protein, 741 aa, Adeno-associated virus 2
MAADGYLPDWLEDTLSEGIREWWALKPGAPKPKANQQKQDDGRGLVLPGYKYLGPFNGLDKGEPVNEADAAALEHDKAYDQQLQAGDNPYLRYNHADAEFQERLQEDTSFGGNLGRAVFQAKKRVLEPLGLVEEPVKTAPGKKRPVEHSPVEPDSSSGTGKSGQQPARKRLNFGQTGDADSVPDPQPLGQPPAAPSGLGTNTMATGSGAPMADNNEGADGVGNSSGNWHCDSTWMGDRVITTSTRTWALPTYNNHLYKQISSQSGASNDNHYFGYSTPWGYFDFNRFHCHFSPRDWQRLINNNWGFRPKRLNFKLFNIQVKEVTQNDGTTTIANNLTSTVQVFTDSEYQLPYVLGSAHQGCLPPFPADVFMVPQYGYLTLNNGSQAVGRSSFYCLEYFPSQMLRTGNNFTFSYTFEDVPFHSSYAHSQSLDRLMNPLIDQYLYYLSRTNTPSGTTTQSGLQFSQAGASDIRDQSRNWLPGPCYRQQRVSKTSADNNNSEYSWTGATKYHLNGRDSLVNPGPAMASHKDDEEKFFPQSGVLIFGKQGSEKTNVDIEKVMITDEEEIRTTNPVATEQYGSVSTNLQRGNLANHNNTTNARQAATADVNTQGVLPGMVWQDRDVYLQGPIWAKIPHTDGHFHPSPLMGGFGLKHPPPQILIKNTPVPANPSTTFSAAKFASFITQYSTGQVSVEIEWELQKENSKRWNPEIQYTSNYNKSINVDFTVDTNGVYSEPRPIGTRYL

SEQ ID NO: 197 - protein, 730 aa, Adeno-associated virus 2
MASDGYLPDWLEDNLSEGIREWWDLKPGAPKPKANQQKQDDGRGLVLPGYKYLGPFNGLDKGEPVNAADAAALEHDKAYDQQLKAGDNPYLRYNHADAEFQERLQEDTSFGGNLGRAVFQAKKRVLEPFGLVEEGAKTAPGKKRPVEQSPQEPDSSSGIGKTGQQPAKKRLNFGQTGDSESVPDPQPLGEPPATPAAVGPTTMASGGGAPMADNNEGADGVGNASGNWHCDSTWLGDRVITTSTRTWALPTYNNHLYKQISSASTGASNDNHYFGYSTPWGYFDFNRFHCHFSPRDWQRLINNNWGFRPKRLNFKLFNIQVKEVTTNDGVTTIANNLTSTVQVFSDSEYQLPYVLGSAHQGCLPPFPADVFMIPQYGYLTLNNGSQAVGRSSFYCLEYFPSQMLRTGNNFTFSYTFEDVPFHSSYAHSQSLDRLMNPLIDQYLYYLNRTQNQSGSAQNNDLLFSRGSPAGMSVQPKNWLPGPCYRQQRVSKTKTDNNNSNFTWTGASKYNLNGRESIINPGTAMASHKDDKDKFFPMSGVMIFGKESAGASNTALDNVMITDEEEIKATNPVATERFGTVAVNLQSSSTDPATGDVHVMGALPGMVWQDRDVYLQGPIWAKIPHTDGHFHPSPLMGGFGLKNPPPQILIKNTPVPANPPAEFSATKFASFITQYSTGQVSVEIEWELQKENSKRWNPEVQYTSNYAKSANVDFTVDNNGLYTEPRPIGTR

SEQ ID NO: 198 - protein, 735 aa, Adeno-associated virus 2
  misc_feature (239)..(239): Xaa can be any naturally occurring amino acid
MASDGYLPDWLEDNLSEGIREWWDLKPGAPKPKANQQKQDDGRGLVLPGYKYLGPFNGLDKGEPVNAADAAALEHDKAYDQQLKAGDNPYLRYNHADAEFQERLQEDTSFGGNLGRAVFQAKKRVLEPFGLVEEGAKTAPGKKRPVEQSPQEPDSSSGIGKTGQQPAKKRLNFGQTGDSESVPDPQPLGEPPATPAAVGPTTMASGGGAPMADNNEGADGVGNASGNWHCDSTWLGDRXITTSTRTWALPTYNNHLYKQISSASTGASNDNHYFGYSTPWGYFDFNRFHCHFSPRDWQRLINNNWGFRPKRLNFKLFNIQVKEVTTNDGVTTIANNLTSTVQVFSDSEYQLPYVLGSAHQGCLPPFPADVFMIPQYGYLTLNNGSQAVGRSSFYCLEYFPSQMLRTGNNFTFSYTFEDVPFHSSYAHSQSLDRLMNPLIDQYLYYLNRTQNQSGSAQNNDLLFSRGSPAGMSVQPKNWLPGPCYRQQRVSKTKTDNNNSNFTWTGASKYNLNGRESIINPGTAMASHKDDKDKFFPMSGVMIFGKESAGASNTALDNVMITDEEEIKATNPVATERFGTVAVNLQSSSTDPATGDVHVMGALPGMVWQDRDVYLQGPIWAKIPHTDGHFHPSPLMGGFGLKNPPPQILIKNTPVPANPPAEFSATKFASFITQYSTGQVSVEIEWELQKENSKRWNPEVQYTSNYAKSANVDFTVDNNGLYTEPRPIGTRYLTRP

SEQ ID NO: 199 - protein, 733 aa, Adeno-associated virus 2
MASDGYLPDWLEDNLSEGIREWWDLKPGAPKPKANQQKQDDGRGLVLPGYKYLGPFNGLDKGEPVNAADAAALEHDKAYDQQLKAGDNPYLRYNHADAEFQERLQEDTSFGGNLGRAVFLAKKRVLEPFGLVEEGAKTAPGKKRPVEQSPQEPDSSSGIGKTGQQPAKKRLNFGQTGDSESVPDPQPLGEPPATPAAVGPTTMASGGGAPMADNNEGADGVGNASGNWHCDSTWLGDRVITTSTRTWALPTYNNHLYKQISSASTGASNDNHYFGYSTPWGYFDFNRFHCHFSPRDWQRLINNNWGFRPKRLNFKLFNIQVKEVTTNDGVTTIANNLTSTVQVFSDSEYQLPYVLGSAHQGCLPPFPADVFMIPQYGYLTLNNGSQAVGRSSFYCLEYFPSQMLRTGNNFTFSYTFEDVPFHSSYAHSQSLDRLMNPLIDQYLYYLNRTQNQSGSAQNNDLLFSRGSPAGMSVQPKNWLPGPCYRQQRVSKTKTDNNNSNFTWTGASKYNLNGRESIINPGTAMASHKDDKDKFFPMSGVMIFGKESAGASNTALDNVMITDEEEIKATNPVATERFGTVAVNLQSSSTDPATGDVHVMGALPGMVWQDRDVYLQGPIWAKIPHTDGHFHPSPLMGGFGLKNPPPQILIKNTPVPANPPAEFSATKFASFITQYSTGQVSVEIEWELQKENSKRWNPEVQYTSNYAKSANVDFTVDNNGLYTEPRPIGTRYLT

SEQ ID NO: 200 - protein, 734 aa, Adeno-associated virus 2
MAADGYLPDWLEDTLSEGIRQWWKLKPGPPPPKPAERHKDDSRGLVLPGCKYLGPFNGLDKGEPVNEADAAALEHDKAYDRQLDSGDNPYLKYNHADAEFQERLKEDTSFGGNLGRAVFQAKKRVLEPLGLVEEPVKTAPGKKRPVEHSPVEPDSSSGTGKAGQQPARKRLNFGQTGDADSVPDPQPLGQPPAAPSGLGTNTMATGSGAPMADNNEGADGVGNSSGNWHCDSTWMGDRVITTSTRTWALPTYNNHLYKQISSQSGASNDNHYFGYSTPWGYFDFNRFHCHFSPRDWQRLINNNWGFRPKRLNFKLFNIQVKEVTQNDGTTTIANNLTSTVQVFSDSEYQLPYVLGSAHQGCLPPFPADVFMIPQYGYLTLNNGSQAVGRSSFYCLEYFPSQMLRTGNNFTFNYTFEDVPFHSSYAHSQSLDRLMNPLIDQYLYYLNRTQNQSGSAQNNDLLFSRGSPAGMSVQPKNWLPGPCYRQQRVSKTKTDNNNSNFTWTGASKYNLNGRESIINPGTAMASHKDDKDKFFPMSGVMIFGKESAGASNTALDNVMITDEEEIKATNPVATERFGTVAVNLQSSSTDPATGDVHVMGALPGMVWQDRDVYLQGPIWAKIPHTDGHFHPSPLMGGFGLKNPPPQILIKNTPVPANPPAEFSATKFASFITQYSTGQVSVEIEWELQKENSKRWNPEVQYTSNYAKSANVDFTVDNNGLYTEPRPIGTRYLTRP

SEQ ID NO: 201 - protein, 734 aa, Adeno-associated virus 2
MAADGYLPDWLEDTLSEGIRQWWKLKPGPPPPKPAERHKDDSRGLVLPGYKYLGPFNGLDKGEPVNEADAAALEHDKAYDRQLDSGDNPYLKYNHADAEFQERLKEDTSFGGNLGRAVFQAKKRVLEPLGLVEEPVKTAPGKKRPVEHSPVEPDSSSGTGKAGQQPARKRLNFGQTGDADSVPDPQPLGQPPAAPSGLGTNTMATGSGAPMADNNEGADGVGNSSGNWHCDSTWMGDRVITTSTRTWALSTYNNHLYKQISSQSGASNDNHYFGYSTPWGYFDFNRFHCHFSPRDWQRLINNNWGFRPKRLNFKLFNIQVKEVTQNDGTTTIANNLTSTVQVFTDSEYQLPYVLGSAHQGCLPPFPADVFMVPQYGYLTLNNGSQAVGRSSFYCLEYFPSQMLRTGNNFTFSYTFEDVPFHSSYAHSQSLDRLMNPLIDQYLYYLSRTNTPSGTTTQSRLQFSQAGASDIRDQSRNWLPGPCYRQQRVSKTSADNNNSEYSWTGATKYHLNGRDSLVNPGPAMASHKDDEEKFFPQSGVLIFGKQGSEKTNVDIEKVMITDEEEIRTTNPVATEQYGSVSTNLQRGNRQAATADVNTQGVLPGMVWQDRDVYLQGPIWAKIPHTDGHFHPSPLMGGFGLKHPPPQILIKNTPVPANPSTTFSAAKFASFITQYSTGQVSVEIEWELQKENSKRWNPEIQYTSNYNKSINVDFTVDTNGVYSEPRPIGTRYLTRN

SEQ ID NO: 202 - protein, 738 aa, Adeno-associated virus 2
MAADGYLPDWLEDTLSEGIRQWWKLKPGPPPPKPAERHKDDSRGLVLPGYKYLGPFNGLDKGEPVNEADAAALEHDKAYDRQLDGGDNPYLKYNHADAEFQERLKEDTSFGGNLGRAVFQAKKRVLEPLGLVEEPVKTAPGKKRPVEHSPVEPDSSSGTGKAGQQPARKRLNFGQTGDADSVPDPQPLGQPPAAPSGLGTNTMATGSGAPMADNNEGADGVGNSSGNWHCDSTWMGDRVITTSTRTWALPTYNNHLYKQISSQSGASNDNHYFGYSTPWGYFDFNRFHCHFSPRDWQRLINNNWGFRPKRLNFKLFNIQVKEVTQNDGTTTIANNLTSTVQVFTDSEYQLPYVLGSAHQGCLPPFPADVFMVPQYGYLTLNNGSQAVGRSSFYCLEYFPSQMLRTGNNFTFSYTFEDVPFHSSYAHSQSLDRLMNPLIDQYLYYLSRTNTPSGTTTQSGLQFSQAGASDIRDQSRNWLPGPCYRQQRVSKTSADNNNSEYSWTGATKYHLNGRDSLVNPGPAMASHKDDEEKFFPQSGVLIFGKQGSEKTNVDIEKVMITDEEEIRTTNPVATEQYGSVSTNLQRGNRQAATADVNTQGVLPGMVWQDRDVYLQGPIWAKIPHTDGHFHPSPLMGGFGLKHPPPQILIKNTPVPANPSTTFSAAKFASFITQYSTGQVSVEIEWELQKENSKRWNPEIQYTSNYNKSVNVDFTVDTNGVYSEPRPIGTRYLTRNLLRP

SEQ ID NO: 203 - DNA, 2208 bp, Adeno-associated virus
atggctgccgatggttatcttccagattggctcgaggacactctctctgaaggaataagacagtggtggaagctcaaacctggcccaccaccaccaaagcccgcagagcggcataaggacgacagcaggggtcttgtgcttcctgggtacaagtacctcggacccttcaacggactcgacaagggggagccggtcaacgaggcagacgccgcggccctcgagcacgacaaggcctacgaccggcagctcgacagcggagacaacccgtacctcaagtacaaccacgccgacgcagagtttcaggagcgccttaaagaagatacgtcttttgggggcaacctcggacgagcagtcttccaggcgaaaaagagggttcttgaacctctgggcctggttgaggaacctgttaagacggctccgggaaaaaagaggccggtagagcactctcctgtggagccagactcctcctcgggaaccggaaaagcgggccagcagcctgcaagaaaaagattaaattttggtcagactggagacgcagactccgtacctgacccccagcctctcggacagccaccagcagccccctctggtctgggatctactacaatggctacaggcagtggcgcaccaatggcagacaataacgagggtgccgatggagtgggtaattcctcaggaaattggcattgcgattcccaatggctgggcgacagagtcatcaccaccagcacccgaacctgggccctgcccacatacaacaaccacctctacaagcaaatctccagccaatcaggagccagcaacgacaaccactactttggctacagcaccccctgggggtattttgacttcaacagattccactgccacttttcaccacgtgactggcaaagactcatcaacaacaactggggattccggcccaaaagactcaacttcaagctctttaatattcaagtcaaagaggtcacgcagaatggcggtacgacgacgattgccaataaccttaccagcacggttcaggtgtttactgactcggagtaccagctcccgtacgtcctgggctcggcgcatcaaggatgcctcccgccgtttccagcggacgtcttcatggtcccacagtatggatacctcaccctgaacaacgggagtcaggcggtaggacgctcttccttttactgcctggagtactttccttctcagatgctgcgtactggaaacaactttcagttcagctacacttttgaagacgtgcctttccacagcagctacgctcacagccagagtctggatcggctgatgaatcctctgatcgaccagtacctgtattatctgaacaagacacaaacaaatagtggaactcttcagcagtctcggctactgtttagccaagctggaccaaccaacatgtctcttcaagctaaaaactggctgcctggaccttgctacagacagcagcgtctgtcaaaacaggcaaacggcaacaacaacagcaactttccctggactgcagctacaaagtatcatctaaatggccgggactcgttggttaatccaggaccagctatggccagtcacaaggatgacgaagaaaagtttttccccatgcatggaaccctgatatttggtaaacaaggaacaaatgccaacgacgcggatttggaaaatgtcatgattacagatgaagaagaaatcagggccaccaatcccgtggctacggagcagtacgggactgtgtcaaataatttgcaaaactcaaacactggtccaactactggaactgtcaatcaccaaggagcgttacctggtatggtgtggcaggatcgagacgtgtacctgcagggacccatttgggccaagattcctcacaccgatggacactttcatccttctccactgacgggaggttttggactcaaacacccgcctcctcagatcatgatcaaaaacactcccgttccagccaatcctcccacaaacttcagttctgccaagtttgcttctttcatcacacagtattccacgggacaggtcagcgtggagatcgagtgggagctgcagaaggagaacagcaaacgctggaatcccgaaattcagtacacttccaactacaacaagtctgttaatgtggactttactgtggacactaatggtgtgtattcagagcctcgccccattggcaccagatacctgactcgtaatctgtaa

SEQ ID NO: 204 - protein, 735 aa, Adeno-associated virus
MAADGYLPDWLEDTLSEGIRQWWKLKPGPPPPKPAERHKDDSRGLVLPGYKYLGPFNGLDKGEPVNEADAAALEHDKAYDRQLDSGDNPYLKYNHADAEFQERLKEDTSFGGNLGRAVFQAKKRVLEPLGLVEEPVKTAPGKKRPVEHSPVEPDSSSGTGKAGQQPARKRLNFGQTGDADSVPDPQPLGQPPAAPSGLGSTTMATGSGAPMADNNEGADGVGNSSGNWHCDSQWLGDRVITTSTRTWALPTYNNHLYKQISSQSGASNDNHYFGYSTPWGYFDFNRFHCHFSPRDWQRLINNNWGFRPKRLNFKLFNIQVKEVTQNGGTTTIANNLTSTVQVFTDSEYQLPYVLGSAHQGCLPPFPADVFMVPQYGYLTLNNGSQAVGRSSFYCLEYFPSQMLRTGNNFQFSYTFEDVPFHSSYAHSQSLDRLMNPLIDQYLYYLNKTQTNSGTLQQSRLLFSQAGPTNMSLQAKNWLPGPCYRQQRLSKQANGNNNSNFPWTAATKYHLNGRDSLVNPGPAMASHKDDEEKFFPMHGTLIFGKQGTNANDADLENVMITDEEEIRATNPVATEQYGTVSNNLQNSNTGPTTGTVNHQGALPGMVWQDRDVYLQGPIWAKIPHTDGHFHPSPLTGGFGLKHPPPQIMIKNTPVPANPPTNFSSAKFASFITQYSTGQVSVEIEWELQKENSKRWNPEIQYTSNYNKSVNVDFTVDTNGVYSEPRPIGTRYLTRNL

SEQ ID NO: 205 - DNA, 2208 bp, Adeno-associated virus
atggctgccgatggttatcttccagattggctcgaggacactctctctgaaggaataagacagtggtggaagctcaaacctggcccaccaccaccaaagctcgcagagcggcatcaggacgacagcaggggtcttgtgcttcctgggtacaagtacctcggacccttcaacggactcgacaaaggagagccggtcaacgaggcagacgccgcggccctcgagcacgacaaggcctacgaccggcagctcgacagcggagacaacccgtacctcaagtacaaccacgccgacgcggagtttcaggagcgtcttaaagaagatacgtcttttgggggcaacctcggacgagcagtcttccaggcgaaaaagagggttcttgaacctctgggcctggttgaggaacctgttaagacggctccgggaaaaaagaggccggtagagcactctcctgtggagccagactcctcctcgggaaccggaaaggcgggccatcagcctgcgagaaagagattgaattttggtcagactggagacgcagactccgtacctgacccccagcctctcggacagccaccagcagcccccacaagtctgggatctactacaatggctacaggcagtggcgcaccaatggcagacaataacgagggtgccgatggagtgggtaattcctcaggaaattggcattgcgattcccaatggctgggcgacagagtcatcaccaccagcacccgaacctgggccctgcccacctacaacaaccacctctacaagcaaatctccagccaatcaggagcctcgaacgacaaccactactttggctacagcaccccctgggggtattttgacttcaacagattccactgtcacttctccccacgtgattggcaaagactcatcaacaacaactggggattccgacccaagagactcaacttcaagctctttaacattcaagtcaaagaggtcacgcagaatgacggtacgacgacgattgccaataaccttaccagcacggttcaggtgtttactgactcggagtaccagctcccgtacgtcctcggctcggcgcatcaaggatgcctcccgccgtttccagcggacgtcttcacggtcccacagtatggatacctcaccctgaacaacgggagtcaggcggtaggacgctcttccttttactgcctggagtactttccttctcagatgctgcgtactggaaacaaccttaccttcagctacacctttgaggacgttcctttccacagcagctacgctcacagccagagtttggaccggctgatgaatcctctgatcgaccagtatctatattatctgaacaggacacaatcaaatagtggaactcttcagcagtctaggctactgtttagccaagctggacccaccagcatgtctcttcaagctaaaaactggctgcctggaccttgctacagacagcagcgtctttcaaagcaggcaaacgacaacaacaacagcaactttccctggactgcggctacaaagtatcatctaaatggccgggactcgttggttaatccaggaccagctatggccagccacaaagacgatgaagaaaagtttttccccatgcatggaaccctgatatttggtaaacaaggaacaaatgctaacgacgcggatttggagcatgttatgattacagatgaagaagaaatcaggaccaccaatcctgtggctacagagcagtacggaaacgtgtcaaataatttgcaaaactcaaatactggtccaactacagaaaatgtcaatcaccagggagcgttacctggtatggtgtggcaggatcgagacgtgtacctgcagggacccatttgggccaagattcctcacaccgacggacactttcacccttctccactgatgggaggttttggactcaaacacccgcctcctcaaatcatgatcaaaaacactcccgttccagccaatcctcccacaaactacagttctgccaagtttgcttctttcatcacacagtattccacgggccaggtcagcgtggagattgagtgggagctgcggaaggagaacagcaaacgctggaaccccgagatccagtatacttccaactacaacaaatctgttaatgtggactttactgtggacactaatggtgtgtattcagagcctcgccccattggcaccagatacctgactcgtaatctgtaa

SEQ ID NO: 206 - protein, 735 aa, Adeno-associated virus
MAADGYLPDWLEDTLSEGIRQWWKLKPGPPPPKLAERHQDDSRGLVLPGYKYLGPFNGLDKGEPVNEADAAALEHDKAYDRQLDSGDNPYLKYNHADAEFQERLKEDTSFGGNLGRAVFQAKKRVLEPLGLVEEPVKTAPGKKRPVEHSPVEPDSSSGTGKAGHQPARKRLNFGQTGDADSVPDPQPLGQPPAAPTSLGSTTMATGSGAPMADNNEGADGVGNSSGNWHCDSQWLGDRVITTSTRTWALPTYNNHLYKQISSQSGASNDNHYFGYSTPWGYFDFNRFHCHFSPRDWQRLINNNWGFRPKRLNFKLFNIQVKEVTQNDGTTTIANNLTSTVQVFTDSEYQLPYVLGSAHQGCLPPFPADVFTVPQYGYLTLNNGSQAVGRSSFYCLEYFPSQMLRTGNNLTFSYTFEDVPFHSSYAHSQSLDRLMNPLIDQYLYYLNRTQSNSGTLQQSRLLFSQAGPTSMSLQAKNWLPGPCYRQQRLSKQANDNNNSNFPWTAATKYHLNGRDSLVNPGPAMASHKDDEEKFFPMHGTLIFGKQGTNANDADLEHVMITDEEEIRTTNPVATEQYGNVSNNLQNSNTGPTTENVNHQGALPGMVWQDRDVYLQGPIWAKIPHTDGHFHPSPLMGGFGLKHPPPQIMIKNTPVPANPPTNYSSAKFASFITQYSTGQVSVEIEWELRKENSKRWNPEIQYTSNYNKSVNVDFTVDTNGVYSEPRPIGTRYLTRNL

SEQ ID NO: 207 - DNA, 2208 bp, Adeno-associated virus
atggctgccgatggttatcttccagattggctcgaggacactctctctgaaggaataagacagtggtggaagctcaaacctggcccaccaccaccaaagcccgcagagcggcatcaggacgacagcaggggtcttgtgcttcctgggtacaagtacctcggacccttcaacggactcgacaaaggagagccggtcaacgaggcagacgccgcggccctcgagcacgacaaggcctacgaccggcagctcgacagcggagacaacccgtacctcaagtacaaccacgccgacgcggagtttcaggagcgtcttaaagaagatacgtcttttgggggcaacctcggacgagcagtcttccaggcgaaaaagagggttcttgaacctctgggcctggttgaggaacctgttaagacggctccgggaaaaaagaggccggtagagcactctcctgtggagccagactcctcctcgggaaccggaaaagcgggccatcagcctgcgagaaagagattgaattttggtcagactggagacgcagactccgtacctgacccccagcctctcggacagccaccagcagcccccacaagtttgggatctactacaatggctacaggcagtggcgcaccaatggcagacaataacgagggtgccgatggagtgggtaattcctcaggaaattggcattgcgattcccaatggctgggcgacagagtcatcaccaccagcacccgaacctgggccctgcccacctacaacaaccacctctacaagcaaatctccagccaatcaggagcctcgaacgacaaccactactttggctacagcaccccctgggggtattttgacttcaacagattccactgtcacttctccccacgtgattggcaaagactcatcaacaacaactggggattccgacccaagagactcaacttcaagctctttaacattcaagtcaaggaggtcacgcagaatgacggtacgacgacgattgccaataaccttaccagcacggttcaggtgtttactgactcggagtaccagctcccgtacgtcctcggctcggcgcatcaaggatgcctcccgccgtttccagcggacgtcttcatggtcccacagtatggatacctcaccctgaacaacgggagtcaggcggtaggacgctcttccttttactgcctggagtactttccttctcagatgctgcgtactggaaacaactttaccttcagctacacctttgaggacgttcctttccacagcagctacgctcacagccagagtttggaccggctgatgaatcctctgatcgaccagtatctatattatctgaacaggacacaatcaaatagtggaactcttcagcagtctaggctactgtttagccaagctggacccaccagcatgtctcttcaagctaaaaactggctgcctggaccttgctacagacagcagcgtctttcaaagcaggcaaacgacaacaacaacagcaactttccctggactgcggctacaaagtatcgtctaaatggccgggactcgttggttaatccaggaccagctatggccagccacaaagacgatgaagaaaagtttttccccatgcatggaaccctgatatttggtaaacaaggaacaaatgctaacgacgcggatttggagcatgttatgattacagatgaagaagaaatcaggaccaccaatcctgtggctacagagcagtacggaaacgtgtcaaataatttgcaaaactcaaatactggtccaactacagaaaatgtcaatcaccagggagcgttacctggtatggtgtggcaggatcgagacgtgtacctgcagggacccatttgggccaagattcctcacaccgacggacactttcacccttctccactgatgggaggttttggactcaaacacccgcctcctcaaatcatgatcaaaaacactcccgttccagccaatcctcccacaaacttcagttctgccaagtttgcttctttcatcacacagtattccacgggccaggtcagcgtggagattgagtgggagctgcagaaggagaacagcaaacgctggaaccccgagatccagtatacttccaactacaacaaatctgttaatgtggactttactgtggacactaatggtgtgtattcagagcctcgccccattggcaccagatacctgactcgtaatctgtaa

SEQ ID NO: 208 - protein, 735 aa, Adeno-associated virus
MAADGYLPDWLEDTLSEGIRQWWKLKPGPPPPKPAERHQDDSRGLVLPGYKYLGPFNGLDKGEPVNEADAAALEHDKAYDRQLDSGDNPYLKYNHADAEFQERLKEDTSFGGNLGRAVFQAKKRVLEPLGLVEEPVKTAPGKKRPVEHSPVEPDSSSGTGKAGHQPARKRLNFGQTGDADSVPDPQPLGQPPAAPTSLGSTTMATGSGAPMADNNEGADGVGNSSGNWHCDSQWLGDRVITTSTRTWALPTYNNHLYKQISSQSGASNDNHYFGYSTPWGYFDFNRFHCHFSPRDWQRLINNNWGFRPKRLNFKLFNIQVKEVTQNDGTTTIANNLTSTVQVFTDSEYQLPYVLGSAHQGCLPPFPADVFMVPQYGYLTLNNGSQAVGRSSFYCLEYFPSQMLRTGNNFTFSYTFEDVPFHSSYAHSQSLDRLMNPLIDQYLYYLNRTQSNSGTLQQSRLLFSQAGPTSMSLQAKNWLPGPCYRQQRLSKQANDNNNSNFPWTAATKYRLNGRDSLVNPGPAMASHKDDEEKFFPMHGTLIFGKQGTNANDADLEHVMITDEEEIRTTNPVATEQYGNVSNNLQNSNTGPTTENVNHQGALPGMVWQDRDVYLQGPIWAKIPHTDGHFHPSPLMGGFGLKHPPPQIMIKNTPVPANPPTNFSSAKFASFITQYSTGQVSVEIEWELQKENSKRWNPEIQYTSNYNKSVNVDFTVDTNGVYSEPRPIGTRYLTRNL

SEQ ID NO: 209 - DNA, 2208 bp, Adeno-associated virus
atggctgccgatggttatcttccagattggctcgaggacactctctctgaaggaataagacagtggtggaagctcaaacctggcccaccaccaccaaagcccgcagagcggcatcaggacgacagcaggggtcttgtgcttcctgggtacaagtacctcggacccttcaacggactcgacaaaggagagccggtcaacgaggcagacgccgcggccctcgagcacgacaaggcctacgaccggcagctcgacagcggagacaacccgtacctcaagtacaaccacgccgacgcggagtttcaggagcgtcttaaagaagatacgtcttttgggggcaacctcggacgagcagtcttccaggcgaaaaagagggttcttgaacctctgggcctggttgaggaacctgttaagacggctccgggaaaaaagaggccggtagagcactctcctgtggagccagactcctcctcgggaaccggaaaagcgggccatcagcctgcgagaaagagattgaattttggtcagactggagacgcagactccgtacctgacccccagcctctcggacagccaccagcagcccccacaagtttgggatctactacaatggctacaggcagtggcgcaccaatggcagacaataacgagggtgccgatggagtgggtaattcctcaggaaattggcattgcgattcccaatggctgggcgacagagtcatcaccaccagcacccgaacctgggccctgcccacctacaacaaccacctctacaagcaaatctccagccaatcaggagcctcgaacgacaaccactactttggctacagcaccccctgggggtattttgacttcaacagattccactgtcacttctccccacgtgattggcaaagactcatcaacaacaactggggattccgacccaagagactcaacttcaagctctttaacattcaagtcaaagaggtcacgcagaatgacggtacgacgacgattgccaataaccttaccagcacggttcaggtgtttactgactcggagtaccagctcccgtacgtcctcggctcggcgcatcaaggatgcctcccgccgtttccagcggacgtcttcatggtcccacagtatggatacctcaccctgaacaacgggagtcaggcggtaggacgcccttccttttactgcctggagtactttccttctcagatgctgcgtactggaaacaactttaccttcagctacacctttgaggacgttcctttccacagcagctacgctcacagccagagtttggaccggctgatgaatcctctgatcgaccagtatctatattatctgaacaggacacaatcaaatagtggaactcttcagcagtctaggctactgtttagccaagctggacccaccagcatgtctcttcaagctaaaaactggctgcctggaccttgctacagacagcagcgtctttcaaagcaggcaaacgacaacaacaacagcaactttccctggactgcggctacaaagtatcatctaaatggccgggactcgttggttaatccaggaccagctatggccagccacaaagacgatgaagaaaagtttttccccatgcatgggaccctgatatttggtaaacaaggaacaaatgctaacgacgcggatttggagcatgttatgattacagatgaagaagaaatcaggaccaccaatcctgtggctacagagcagtacggaaacgtgtcaaataatttgcaaaactcaaatactggtccaactacagaaaatgtcaatcaccagggagcgttacctggtatggtgtggcaggatcgagacgtgtacctgcagggacccatttgggccaagattcctcacaccgacggacactttcacccttctccactgatgggaggttttggactcaaacacccgcctcctcaaatcatgatcaaaaacactcccgttccagccaatcctcccacaaacttcagttctgccaagtttgcttctttcatcacacagtattccacgggccaggtcagcgtggagattgagtgggagctgcagaaggagaacagcaaacgctggaaccccgagatccagtatacttccaactacaacaaatctgttaatgtggactttactgtggacactaatggtgtgtattcagagcctcgccccattggcaccagatacctgactcgtaatctgtaa

SEQ ID NO: 210 - protein, 735 aa, Adeno-associated virus
MAADGYLPDWLEDTLSEGIRQWWKLKPGPPPPKPAERHQDDSRGLVLPGYKYLGPFNGLDKGEPVNEADAAALEHDKAYDRQLDSGDNPYLKYNHADAEFQERLKEDTSFGGNLGRAVFQAKKRVLEPLGLVEEPVKTAPGKKRPVEHSPVEPDSSSGTGKAGHQPARKRLNFGQTGDADSVPDPQPLGQPPAAPTSLGSTTMATGSGAPMADNNEGADGVGNSSGNWHCDSQWLGDRVITTSTRTWALPTYNNHLYKQISSQSGASNDNHYFGYSTPWGYFDFNRFHCHFSPRDWQRLINNNWGFRPKRLNFKLFNIQVKEVTQNDGTTTIANNLTSTVQVFTDSEYQLPYVLGSAHQGCLPPFPADVFMVPQYGYLTLNNGSQAVGRPSFYCLEYFPSQMLRTGNNFTFSYTFEDVPFHSSYAHSQSLDRLMNPLIDQYLYYLNRTQSNSGTLQQSRLLFSQAGPTSMSLQAKNWLPGPCYRQQRLSKQANDNNNSNFPWTAATKYHLNGRDSLVNPGPAMASHKDDEEKFFPMHGTLIFGKQGTNANDADLEHVMITDEEEIRTTNPVATEQYGNVSNNLQNSNTGPTTENVNHQGALPGMVWQDRDVYLQGPIWAKIPHTDGHFHPSPLMGGFGLKHPPPQIMIKNTPVPANPPTNFSSAKFASFITQYSTGQVSVEIEWELQKENSKRWNPEIQYTSNYNKSVNVDFTVDTNGVYSEPRPIGTRYLTRNL

SEQ ID NO: 211 - DNA, 2208 bp, Adeno-associated virus
atggctgccgatggttatcttccagattggctcgaggacactctctctgaaggaataagacagtggtggaagctcaaacctggcccaccaccaccaaagcccgcagagcggcataaggacgacagcaggggtcttgtgcttcctgggtacaagtacctcggacccttcaacggactcgacaagggagagccggtcaacgaggcagacgccgcggccctcgagcacgacaaggcctacgaccggcagctcgacagcggagacaacccgtacctcaagtacaaccacgccgacgcggagtttcaggagcgccttaaagaagatacgtcttttgggggcaacctcggacgagcagtcttccaggcaaaaaagagggttcttgaacctctgggcctggttgaggagcctgttaaaacggctccgggaaaaaagaggccggtagagcactctcctgcggagccagactcctcctcgggaaccggaaaagcgggccagcagcctgcaagaaaaagattgaatttcggtcagactggagacgcagactccgtacctgacccccagcctctcggacagccaccagcagccccctctggtctgggaactaatacgatggcttcaggcagtggcgcaccaatggcagacaataacgagggcgccgacggagtgggtaattcctcgggaaattggcattgcgattccacatggatgggcgacagagtcatcaccaccagcacccgaacttgggccctgcccacctacaacaaccatctctacaagcaaatctccagccaatcaggagccagcaacgacaaccactactttggctacagcaccccttgggggtattttgacttcaacagattccactgccacttttcaccacgtgactggcaaagactcatcaacaacaactggggattccggcccaagagactcaacttcaagctctttaacattcaagtcaaagaggtcacgcagaatgacggtacgacgacgattgccaataaccttaccagcacggttcaggtgtttactgactcggagtaccagctcccgtacgtcctcggctcggcgcatcaaggatgcctcccgccgttcccagcagacgtcttcatggtgccacagtatggatacctcaccctgaacaacgggagtcaggcagtaggacgctcttcattttactgcctggagtactttccttctcagatgctgcgtaccggaaacaactttaccttcagctacacctttgaggacgttcctttccacagcagctacgctcacagccagagtttggaccgtctcatgaatcctctcatcgaccagtacctgtattacttgagcagaacaaacactccaagcggaaccaccacgcagtccaggcttcagttttctcaggccggagcaagtgacattcgggaccagtctaggaactggcttcctggaccctgttaccgccagcagcgagtatcaaagacatctgcggataacaacaacagtgaatactcgtggactggagctaccaagtaccacctcaatggcagagactctctggtgaatccgggcccggccatggccagccacaaggacgatgaagaaaagttttttcctcagagcggggttctcatctttgggaagcaaggctcagagaaaacaaatgtggacattgaaaaggtcatgattacagacgaagaggaaatcaggaccaccaatcccgtggctacggagcagtatggttctgtatctaccaacctgcagggcggcaacacacaagcagctaccgcagatgtcaacacacaaggcgttcttccaggcatggtctggcaggacagagacgtgtacctgcaggggcccatctgggcaaagattccacacacggacggacattttcacccctctcccctcatgggcggattcggacttaaacaccctcctccacagattctcatcaagaacaccccggtacctgcgaatccttcgaccaccttcagtgcggcaaagtttgcttctttcatcacacagtattccacggggcaggtcagcgtggagatcgagtgggagctgcagaaggagaacagcaaacgctggaatcccgagatccagtacacttccaactacaacaaatctgttaatgtggactttactgttgacactaatggcgtgtattcagagcctcgccccattggcaccagatacctgactcgtaatctgtaa

SEQ ID NO: 212 - protein, 735 aa, Adeno-associated virus
MAADGYLPDWLEDTLSEGIRQWWKLKPGPPPPKPAERHKDDSRGLVLPGYKYLGPFNGLDKGEPVNEADAAALEHDKAYDRQLDSGDNPYLKYNHADAEFQERLKEDTSFGGNLGRAVFQAKKRVLEPLGLVEEPVKTAPGKKRPVEHSPAEPDSSSGTGKAGQQPARKRLNFGQTGDADSVPDPQPLGQPPAAPSGLGTNTMASGSGAPMADNNEGADGVGNSSGNWHCDSTWMGDRVITTSTRTWALPTYNNHLYKQISSQSGASNDNHYFGYSTPWGYFDFNRFHCHFSPRDWQRLINNNWGFRPKRLNFKLFNIQVKEVTQNDGTTTIANNLTSTVQVFTDSEYQLPYVLGSAHQGCLPPFPADVFMVPQYGYLTLNNGSQAVGRSSFYCLEYFPSQMLRTGNNFTFSYTFEDVPFHSSYAHSQSLDRLMNPLIDQYLYYLSRTNTPSGTTTQSRLQFSQAGASDIRDQSRNWLPGPCYRQQRVSKTSADNNNSEYSWTGATKYHLNGRDSLVNPGPAMASHKDDEEKFFPQSGVLIFGKQGSEKTNVDIEKVMITDEEEIRTTNPVATEQYGSVSTNLQGGNTQAATADVNTQGVLPGMVWQDRDVYLQGPIWAKIPHTDGHFHPSPLMGGFGLKHPPPQILIKNTPVPANPSTTFSAAKFASFITQYSTGQVSVEIEWELQKENSKRWNPEIQYTSNYNKSVNVDFTVDTNGVYSEPRPIGTRYLTRNL

SEQ ID NO: 213 - DNA, 3161 bp, Adeno-associated virus
gattgaatttagcggccgcgaattcgcccttgctgcgtcaactggaccaatgagaactttccattcaatgattgcgtcgacaagatggtgatctggtgggaggagggaaagatgaccgccaaggtcatggagtcggccaaagccattctcggaggaagcaaggtgcgcgtggaccagaaatgtaagtcctcggcccagatagacccgactcccgtgattgtcacctccaacaccaacatgtgcgccgtgattgacgggaactcaacgaccttcgagcaccagcagccgttgcaagaccggatgttcaaatttgaactcacccgccgtctggatcatgactttgggaaggtcaccaagcaggaagtcaaagactttttccggtgggcaaaggatcacgtggttgaggtggagcatgaattctacgtcaaaaagggtggagccaagaaaagacccgcccccagtgacgcagatataagtgagcccaaacgggcgcgcgggtcagttgcgcagccatcgacgtcagacgcggaagcttcgatcaactacgcggacaggtaccaaaacaaatgttctcgtcacgtgggcatgaatctgatgctgtttccctgcagacaatgcgagagaatgaatcaaaattcaaatatctgcttcactcacggacagaaggactgtttagagtgctttcccgtgtcagaatctcaacccgtttctgtcgtcaaaaaggcgtatcagaaactttgctacattcatcatatcatgggaaaggtgccagacgcttgcactgcctgcgatctggtcaatgtggatttggatgactgcatctctgaacaataaatgatttaaatcaggtatggctgccgatggttatcttccagattggctcaaggacactctctctgaaggaataagacagtggtggaagctcaaacctggcccaccaccaccaaagcccgcagagcggcataaggacgacagcgggggtcttgtgcttcctgggtacaagtacctcggacccttcaacggactcgacaagggagagccggtcaacgaggcagacgccgcggccctcgagtacgacaaggcctacgaccggcagctcgacagcggagacaacccgtacctcaagtacaaccacgccgacgcggagtttcaggagcgccttaaagaagatacgtcttttgggggcaacctcggacgagcagtcttccaggcgaaaaagagggttcttgaacctctgggcctggttgaggaacctgttaagacggctccgggaaaaaagaggccggtagagcactctcctgtggagccagactcctcctcgggaacaggaaaagcgggccagcagcctgcgagaaagagattgaattttggtcagactggagacgcagactccgtacctgacccccagcctctcggacagccaccagcagccccctctggtctgggaactaatacgatggctacaggcagtggcgcaccaatggcagacaataacgagggcgccgacggagtgggtaattcctcgggaagttggcattgcgattccacatggatgggcgacagagtcatcaccaccagcacccgaacctgggctctgcccacctacaacaaccatctgtacaagcagatctccagccaatcaggagccagcaacgacaaccactactttggctacagcaccccttgggggtattttgacttcaacagattccactgccacttttcaccacgtgactggcaaagactcatcaacaacaactggggattccggcccaagagactcaacttcaagctctttaacattcaagtcaaggaggtcacgcagaatgacggtacgacgacgattgccaataaccttaccagcacggttcaggtgtttactgactcggagtaccagctcccgtacgtccccggctcggcgcatcaaggatgcctcccgccgttcccagcagacgtcttcatggtgccacagtatggatacctcaccctgaacaacgggagtcaggcagtaggacgctcttcattttactgcctggagtactttccttctcagatgcttcgtaccggaaacaactttaccttcagctacacctttgaggatgttcctttccacagcagctacgctcacagccagagtttggaccgtctcatgaatcctctcatcgaccagtacctgtattacttgagcagaacaaacactccaagcggaaccaccacgcagtccaggcttcagttttctcaggccggagcaagtgacattcgggaccagtctaggaactggcttcctggaccctgttaccgccagcagcgagtatcaaagacagctgcggacaacaacaacagtgaatactcgtggactggagctaccaagtaccacctcaatggcagagactctctggtgaatccgggcccggccatggccagccacaaggacgatgaagaaaagttttttcctcaaagcggggttctcatctttgggaagcaaggctcagagaaaacaaatgtggacattgaaaaggtcatgattacagacgaagaggaaatcagaaccaccaatcccgtggccacggagcagtatggttctgtatctaccaacctccagagcggcaacacacaagcagctactgcagatgtcaacacacaaggcgttcttccaggcatggtctggcaggacagagacgtgcacctgcaggggcctatctgggcaaagattccacacacggacggacattttcacccctctcccctcatgggcggatttggacttaaacaccctcctccacagattctcatcaagaacaccccggtacctgcaaatccttcgaccaccttcagtgcggcaaagtttgcttccttcatcacacagtattccacagggcaggtcagcgtggagatcgagtgggagctgcagaaggagaacagcaaacgctggaaccccgagatccagtacacttccaactacaacaaatctgttaatgtggactttactgtggacactaatggtgtgtattcagagcctcgccccattggcaccagatacctgactcgtaatctgtaattgcttgttaatcaataaaccgtttaattcgtttcagttgaactttggtctctgcgaagggcgaattcgtttaaaccctgcaggactagtccctttagtgagg

SEQ ID NO: 214 - DNA, 3162 bp, Adeno-associated virus
gaattgaatttagcggccgcgaattcgcccttcgcagagaccaaagttcaactgaaacgaattaaacggtttattgattaacaagcaattacagattacgagtcaggtatctggtgccaatggggcgaggctctgaatacacgccattagtgtccacagtaaagtccacattaacagacttgttgtagttggaagtgtactgaatttcgggattccagcgtttgctgttttccttctgcagctcccactcgatctccacgctgacctgtcccgtggagtactgtgtgatgaaggaagcaaactttgccgcactgaaggtggtcgaaggattcgcaggtaccggggtgttcttgatgagaatctgtggaggagggtgtttaagtccgaatccacccatgaggggagaggggtgaaaatgtccgtccgtgtgtggaatctttgcccagatgggcccctgaaggtacacatctctgtcctgccagaccatgcctggaagaacgccttgtgtgttgacatctgcggtagctgcttgtctgttgcctctctggaggttggtagatacagaaccgtactgctccgtagccacgggattggttgtcctgatttcctcttcgtctgtaatcatgaccttttcaatgtccacatttgttttctctgagccttgcttcccaaagatgagaaccccgctctgaggaaaaaacttttcttcattgtccttgtggcttgccatggccgggcccggattcaccagagagtctctgccattgaggtggtacttggtagctccagtccacgagtattcactgttgttgttatccgcagatgtctttgatactcgctgctggcggtaacagggtccaggaagccagttcctagactggtcccgaatgtcactcgctccggcctgagaaaactgaagccttgactgcgtggtggttccacttggagtgtttgttgtgctcaagtaatacaggtactggtcgatgagaggattcatgagacggtccagactctggctgtgagcgtagccgctgtggaaaggaacgtcctcaaaagtgtagctgaaggtaaagttgtttccggtacgcagcatctgagaaggaaagtactccaggcagtaaaatgaagagcgtcctactgcctgactcccgttgttcagggtgaggtatccatactgtggcaccatgaagacgtctgctgggaacggcgggaggcatccttgatgcgccgagccgaggacgtacgggagctggtactccgagtcagtaaacacctgaaccgtgctggtaaggttattggcaatcgtcgtcgtaccgtcattctgcgtgacctctttgacttgaatgttaaagagcttgaagttgagtctcttgggtcggaatccccagttgttgttgatgagtctttgccagtcacgtggtgaaaagtggcagtggaatctgttgaagtcaaaatacccccaaggggtgctgtagccaaagtagtgattgtcgttcgaggctcctgattggctggaaatttgtttgtagaggtggttgttgtaggtgggcagggcccaggttcgggtgctggtggtgatgactctgtcgcccatccatgtggaatcgcaatgccaatttcccgaggaattacccactccgtcggcgccctcgttattgtctgccattggtgcgccactgcctgtagccatcgtattagttcccagaccagagggggctgctggtggctgtccgagaggctgggggtcaggtactgagtctgcgtctccagtctgaccaaaattcaatctttttcttgcaggctgctggcccgcctttccggttcccgaggaggagtctggctccacaggagagtgctctaccggcctcttttttcctggagccgtcttgacaggttccccaaccaggcccagaggttcaagaaccctctttttcgcctggaagactgctcgtccgaggttgcccccaaaagacgtatcttctttaaggcgctcctgaaactccgcgtcggcgtggttgtacttgaggtacgggttgtctccgctgtcgagctgccggtcgtaggctttgtcgtgctcgagggccgcggcgtctgcctcgttgaccggctctcccttgtcgagtccgttgaagggtccgaggtacttgtacccaggaagcacaagacccctgctgtcgtccttatgccgctctgcgggctttggtggtggtgggccaggtttgagcttccaccactgtcttattccttcagagagagtgtcctcgagccaatctggaagataaccatcggcagccatacctgatttaaatcatttattgttcaaagatgcagtcatccaaatccacattgaccagatcgcaggcagtgcaagcgtctggcacctttcccatgatatgatgaatgtagcacagtttctgatacgcctttttgacgacagaaacgggttgagattctgacacgggaaagcactctaaacagtctttctgtccgtgagtgaagcagatatttgaattctgattcattctctcgcattgtctgcagggaaacagcatcagattcatgcccacgtgacgagaacatttgttttggtacctgtctgcgtagttgatcgaagcttccgcgtctgacgtcgatggctgcgcaactgactcgcgcacccgtttgggctcacttatatctgcgtcactgggggcgggtcttttcttggctccaccctttttgacgtagaattcatgctccacctcaaccacgtgatcctttgcccaccggaaaaagtctttgacttcctgcttggtgaccttcccaaagtcatgatccagacggcgggtgagttcaaatttgaacatccggtcttgcaacggctgctggtgttcgaaggtcgttgagttcccgtcaatcacggcgcacatgttggtgttggaggtgacgatcacgggagtcgggtctatctgggccgaggacttgcatttctggtccacgcgcaccttgcttcctccgagaatggctttggccgactccacgaccttggcggtcatcttcccctcctcccaccagatcaccatcttgtcgacacagtcgttgaagggaaagttctcattggtccagttgacgcagcaagggcgaattcgtttaaacctgcaggactagtccctttagtgaggg

SEQ ID NO: 215 - DNA, 3164 bp, Adeno-associated virus
gcgaattgaatttagcggccgcgaattcgcccttcgcagagaccaaagttcaactgaaacgaattaaacggtttattgattaacaagcaattacaaattacgagtcaggtatctggtgccaatggggcgaggctctgaatacacgccattagtgtccacagtaaagtccacattaacagacttgttgtagttggaagtgtactgaatttcgggattccagcgtttgctgttttccttctgcagctcccactcgatctccacgctgacctgtcccgtggagtactgtgtgatgaaggaagcaaactttgccgcactgaaggtggtcgaaggattcgcaggtaccggggtgttcttgatgagaatctgtggaggagggtgtttaggtccgaatccacccatgaggggagaggggtgaaaatgtccgtccgtgtgtggaatctttgcccagatgggcccctgaaggtacacatctctgtcctgccagaccatgcctggaagaacgccttgtgtgttgacatctgcggtagctgcttgtctgttgcctctctggaggttggtagatacagaaccatactgctccgtagccacgggattggttgtcctgatttcctcttcgtctgtaatcatgaccttttcaatgtccacatttgttttctctgagccttgcttcccaaagatgagaaccccgctctgaggaaaaaacttttcttcattgtccttgtggcttgccatggccgggcccggattcaccagagagtctctgccattgaggtggtacttggtagctccagtccacgagtattcactgttgttgttatccgcagatgtctttgatactcgctgctggcggtaacagggtccaggaagccagttcctagactggtcccgaatgtcactcgctccggcctgagaaaactgaagccttgactgcgtggtggttccacttggagtgtttgttgtgctcaagtaatacaggtactggtcgatgagaggattcatgagacggtccagactctggctgtgagcgtagctgctgtggaaaggaacgtcctcaaaagtgtagctgaaggtaaagttgtttccggtacgcagcatctgagaaggaaagtactccgggcagtaaaatgaagagcgtcctactgcctgactcccgttgctcagggtgaggtatccatactgtggcaccatgaagacgtctgctgggaacggcgggaggcatccttgatgcgccgagccgaggacgtacgggagctggtactccgagtcagtaaacacctgaaccgtgctggtaaggttattggcaatcgtcgtcgtaccgtcattctgcgtgacctctttgacttgaatgttaaagagcttgaagttgagtctcttgggtcggaatccccagttgttgttgatgagtctttgccagtcacgtggtgaaaagtggcagtggaatctgttgaagtcaaaatacccccaaggggtgctgtagccaaagtagtgattgtcgttcgaggctcctgattggctggaaatttgtctgtagaggtggttgttgtaggtgggcagggcccaggttcgggtgctggtggtgatgactctgtcgcccatccatgtggaatcgcaatgccgatttcccgaggaattacccactccgtcggcgccctcgttattgtctgccattggtgcgccactgcctgtagccatcgtattagttcccagaccagagggggctgctggtggctgtccgagaggctgggggtcaggtactgagtctgcgtctccagtctgaccaaaattcaatctttttcttgcaggctgctggcccgcctttccggttcccgaggaggagtctggctccacaggagagtgctctaccggcctcttttttcccggagccgtcttaacaggttccccaaccaggcccagaggttcaagaaccctctttttcgcctggaagactgctcgtccgaggttgcccccaaaagacgtatcttctttaaggcgctcctgaaactccgcgtcggcgtggttgtacttgaggtacgggttgtctccgctgtcgagctgccggtcgtaggctttgtcgtgctcgagggccgcggcgtctgcctcgttgaccggctctcccttgtcgagtccgttgaagggtccgaggtacttgtacccaggaagcacaagacccctgctgtcgtccttatgccgctctgcgggctttggtggtggtgggccaggtttgagcttccaccactgtcttattccttcagagagagtgtcctcgagccaatctggaagataaccatcggcagccatacctgatttaaatcatttattgttcaaagatgcagtcatccaaatccacattgaccagatcgcaggcagtgcaagcgtctggcacctttcccatgatatgatgaatgtagcacagtttctgatacgcctttttgacgacagaaacgggttgagattctgacacgggaaagcactctaaacagtctttctgtccgtgagtgaagcagatatttgaattctgattcattctctcgcattgtctgcagggaaacagcatcagattcatgcccacgtgacgagaacatttgttttggtacctgtctgcgtagttgatcgaagcttccgcgtctgacgtcgatggctgcgcaactgactcgcgcacccgtttgggcccacttatatctgcgtcactgggggcgggtcttttcttggctccaccctttttgacgtagaattcatgctccacctcaaccacgtgatcctttgcccaccggaaaaagtctttgacttcctgcttggtgaccttcccaaagtcatgatccagacggcgggtgagttcaaatttgaacatccggtcttgcaacggctgctggtgttcgaaggtcgttgagttcccgtcaatcacggcgcacatgttggtgttggaggtgacgatcacgggagtcgggtctatctgggccgaggacttgcatttctggtccacgcgcaccttgcttcctccgagaatggctttggccgactccacgaccttggcggtcatcttcccctcctcccaccagatcaccatcttgtcgacacagtcgttgaagggaaagttctcattggtccagttgacgcagcaagggcgaattcgtttaaacctgcaggactagtccctttagtgaggg

SEQ ID NO: 216 - DNA, 3163 bp, Adeno-associated virus
accctcactaaagggactagtcctgcaggtttaaacgaattcgcccttgctgcgtcaactggagcaatgagaactttcccttcaacgactgtgtcgacaagatggtgatttggtgggaggaggggaagatgaccgccaaggtcgtggagtcggccaaagccattctcggaggaagcaaggtgcgcgtggaccagaaatgcaagtcctcggcccagatagatccgactcccgtgatcgtcacctccaacaccaacatgtgcgccgtgattgacgggaactcaacgaccttcgaacaccagcagccgttgcaagaccggatgttcaaatttgaactcacccgccgtctggatcatgactttgggaaggtcaccaagcaggaagtcaaagactttttccggtgggcaaaggatcacgtggttgaggtggagcatggattctacgtcaaaaagggtggagccaagaaaagacccgcccctagtgacgcagatataagtgagcccaaacgggtgcgcgagtcagttgcgcagccatcgacgtcggacgcggaagcttcgatcaactacgcggacaggtaccaaaacaaatgttctcgtcacgtgggcatgaatctgatgctgtttccctgcagacaatgcgagagaatgaatcaaaattcaaatatctgcttcactcacggacagaaagactgtttagagtgctttcccgtgtcagaatctcaacctgtttctgtcgtcaaaaaggcgtatcagaaactgcgctacattcatcatatcatgggaaaggtgccagacgcttgcactgcctgcgatctggtcaatgtggatttggatgactgcatctctgaacaataaatgatttaaatcaggtatggctgccgatggttatcttccagattggctcgaggacactctctctgaaggaataagacagtggtggaagctcaaacctggcccaccaccaccaaagcccgcagagcggcataaggacgacagcaggggtcttgtgcttcctgggtacaagtacctcggacccttcaacggactcgacaagggagagccggtcaacgaggcagacgccgcggccctcgagcacgacaaggcctacgaccggcagctcgacagcggagacaacccgtacctcaagtacaaccacgccgacgcggagtttcaggagcgtcttaaagaagatacgtcttttgggggcaacctcggacgagcagtcttccaggcgaaaaagagggttcttgaacctctgggcctggttgaggaacctgttaagacggctccgggaaaaaagaggccggtagagcactctcctgcggagccagactcctcctcgggaaccggaaaagcgggccagcagcctgcaagaaaaagactgaatttcggtcagactggagacgcagactccgtacctgacccccagcctctcggacagccaccagcagcccccacaagtttgggatctactacaatggctacaggcagtggcgcaccaatggcagacaataacgagggtgccgatggagtgggtaattcctcaggaaattggcattgcgattcccaatggctgggcgacagagtcatcaccaccagcacccgaacctgggccctgcccacctacaacaaccacctttacaagcaaatctccagccaatcaggagcctcaaacgacaaccactactttggctacagcaccccctgggggtattttgacttcaacagattccactgccacttttcaccacgtgactggcaaagactcatcaacaacaactggggattccgacccaagagactcaacttcaagctctttaacattcaagtcaaagaggtcacgcagaatgacggtacgacgacgattgccaataaccttaccagcacggttcaggtgtttactgactcggagtaccagctcccgtacgtcctcggctcggcgcatcaaggatgcctcccgccgtttccagcggacgtcttcatggtcccacagtatggatacctcaccctgaacaacgggagtcaggcggtaggacgctcttccttttactgcctggagtgctttccttctcagatgctgcgtactggaaacaactttcagttcagctacacttttgaagacgtgcctttccacagcagctacgctcacagccagagtttggatcggctgatgaatcctctgatcgaccagtacctgtattatctaaacagaacacaaacagctagtggaactcagcagtctcggctactgtttagccaagctggacccacaagcatgtctcttcaagctaaaaactggctgcctggaccgtgttatcgccagcagcgtttgtcaaagcaggcaaacgacaacaacaacagcaactttccctggactggagctaccaagtaccacctcaatggcagagactctttggtgaacccgggcccggccatggccagccacaaggacgatgaagaaaagtttttccccatgcatggaaccctaatatttggtaaagaaggaacaaatgctaccaacgcggaattggaaaatgtcatgattacagatgaagaggaaatcaggaccaccaatcccgtggctacagagcagtacggatatgtgtcaaataatttgcaaaactcaaatactgctgcaagtactgaaactgtgaatcaccaaggagcattacctggtatggtgtggcaggatcgagacgtgtacctgcagggacccatttgggccaagattcctcacaccgatggacactttcatccttctccactgatgggaggttttggactcaaacacccgcctcctcagattatgatcaaaaacactcccgttccagccaatcctcccacaaacttcagttctgccaagtttgcttccttcatcacacagtattccacgggacaggtcagcgtggagatcgagtgggagctgcagaaggagaacagcaaacgctggaatcccgaaattcagtacacttccaactacaacaaatctgttaatgtggactttactgtggacactaatggtgtgtattcagagcctcgccccattggcaccagatacctgactcgtaatctgtaattgcttgttaatcaataaaccgtttaattcgtttcagttgaactttggtctctgcgaagggcgaattcgcggccgctaaattcaattcgcc

SEQ ID NO: 217 - protein, 735 aa, Adeno-associated virus
MAADGYLPDWLEDTLSEGIRQWWKLKPGPPPPKPAERHKDDSRGLVLPGYKYLGPFNGLYKGEPVDEADAAALEHDKAYDRQLDSGDNPYLKYNHADAEFQERLKEDTSFGGNLGRAVFQAKKRVLEPLGLVGEPVKTAPGKKRPVEHSPVEPDSSSGTGKAGNQPARKRLNFGQTGDADSVPDPQPLGQPPAAPSGLGSTTMATGSGAPVADNNEGADGVGNSSGNWHCDSQWLGDRVITTSTRTWALPTYNNHLYKQISSQSGASNDNHYFGYSTPWGYFDFNRFHCHFSPRDRQRLINNNWGFRPKRLNFKLFNIQVKEVTQNDGTTTIANNLTSTVQVFTDSGYQLPYVLGLAHQGCLPPFPADVFMVPQYGYLTLNNGSQAVGRSSFYCLEYFPSQMLRTGNNFQFSYTFEDVPFHSSYAHSQSLDRLMNPLIDQYLYYLNKTQSNSGTLQQSRLLFSQAGPTSMSLQAKNWLPGPCYRQQRLSKQANDNNNSNFPWTAATKYHLNGRDSLVNPGPAMASHKDDEEKFFPMHGTLIFGKQGTNANDADLDNVMITDEEEIRTTNPVATEQYGYVSNNLQNSNTGPTTGTVNHQGALPGMVWQDRDVYLQGPIWAKIPHTDGHFHPSPLMGGFGLKHPPPQIMIKNTPVPANPPTNFSSAKFASFITQYSTGQVSVEIEWELQKEDSKRWNPEIQYTSNYNKPVNVDFTVDTNGVYSEPRPIGTRYLTRNL

SEQ ID NO: 218 - DNA, 2208 bp, Adeno-associated virus
atggctgccgatggttatcttccagattggctcgaggacactctctctgaaggaataagacagtggtggaagctcaaacctggcccaccaccaccaaagcccgcagagcggcataaggacgacagcaggggtcttgtgcttcctgggtacaagtacctcggacccttcaacggactctacaagggagagccggtcgacgaggcagacgccgcggccctcgagcacgacaaggcctacgaccggcagctcgacagcggagacaacccgtacctcaagtacaaccacgccgacgcggagtttcaggagcgccttaaagaagatacgtcttttgggggcaacctcggacgagcagtcttccaggccaaaaagagggttcttgaacctctgggcttggttggggagcctgttaaaacggctccgggaaaaaagaggccggtagagcactctcctgtggagccagactcctcctcgggaaccggaaaagcgggcaaccagcctgcaagaaaaagattgaattttggtcagactggagacgcagactccgtacctgacccccagcctctcggacagccaccagcagccccctctggtctgggatctactacaatggctacaggcagtggcgcaccagtggcagacaataacgagggtgccgatggagtgggtaattcctcaggaaattggcattgcgattcccaatggctgggcgacagagtcatcaccaccagcacccgaacctgggctctgcccacctacaataaccacctctacaagcaaatctccagccaatcaggagcctcaaacgacaaccactactttggctacagcaccccctgggggtattttgacttcaacagattccactgccacttttcaccacgtgaccggcaaagactcatcaacaacaactggggattccgaccaaaaagactcaacttcaagctctttaacattcaagtcaaagaggtcacgcagaatgacggtacgacgacgattgccaataaccttaccagcacggttcaggtgtttactgactcggggtaccagctcccgtacgtcctcggcttggcgcatcaaggatgcctcccgccgttcccagcagacgtcttcatggtgccacagtatggatacctcaccctgaacaacgggagtcaggcggtaggacgctcttccttttactgcctggagtactttccttctcagatgctgcgtactggaaacaactttcagttcagctacacctttgaagacgttcctttccacagcagctacgctcacagccagagtctggatcggctgatgaatcctctgatcgaccagtacctgtattatctgaacaagacacaatcaaatagtggaactcttcagcagtctcggctactgtttagccaagctggacccaccagcatgtctcttcaagctaaaaactggctgcctggaccttgctacagacagcagcgtctgtcaaagcaggcaaacgacaacaacaacagcaactttccctggactgcggctacaaagtatcatctaaatggccgggactcgttggttaatccaggaccagctatggccagccacaaagacgatgaagaaaagtttttccccatgcatggaaccctgatatttggtaaacaaggaacaaatgctaacgacgcggatttggacaatgtcatgattacagatgaagaagaaatccgcaccaccaatcccgtggctacggagcagtacggatatgtgtcaaataatttgcaaaactcaaatactggtccaactactggaactgtcaatcaccaaggagcgttacctggtatggtgtggcaggatcgagacgtgtacctgcagggacccatttgggccaagattcctcacaccgatggacactttcatccttctccacttatgggaggttttggactcaaacacccacctcctcagatcatgattaaaaacactcccgttccagccaatcctcccacaaacttcagttctgccaagtttgcttctttcatcacacagtattccacgggacaagtcagcgtggagatcgagtgggagctgcagaaggaggacagcaaacgctggaaccccgagatccagtacacttccaactataacaaacctgttaatgtggactttactgtggacactaatggtgtgtattcagagcctcgccccattggcaccagatacctgactcgtaatctgtaa

SEQ ID NO: 219 - DNA, 3161 bp, Adeno-associated virus
cgaattgatttagcggccgcgaattcgcccttcgcagagaccaaagttcaactgaaacgaattaaacggtttattgattaacaagcaattacagattacgagtcaggtatctggtgccaatggggcgaggctctgaatacacaccattagtgtccacagtaaagtccacattaacagatttgttgtagttggaagtgtactggatctcgggattccagcgtttgctgttctccttctgtagctcccactcgatctccacgctgacccgccccgtggaatactgtgtgatgaaggaagcaaactttgccgcactgaaggtggtcgaaggattcgcaggtaccggggtgtttttgatgagaatctgtggaggagggtgtttaagtccgaatccgcccatgaggggagaggggtgaaaatgtccgtccgtgtgcggaatctttgcccagataggcccctgcaggtacacgtctctgtcctgccagaccatgcctggaagaacgccttgtgtgttgacatctgcagtagatgcttgtgtgttgccgctctggaggttggtagatacagaaccatactgctccgtggccacgggattggtggttctgatttcctcttcgtctgtaatcatgaccttttcaatgtccacatttgttttctctgatccttgttttccaaagatgagaaccccgctctgaggaaaaaacttttcttcatcgtccttgtggctggccattgccgggcccggattcaccagagagtctctgccattgaggtggtacttggtagctccaatccacgagtattcactgttgttgttgtccgcagatgtctttgatactcgctgctggcggtaacagggtccaggaagccagttcctagactgatcccgaatgtcactcgctccggcctgagaaaactgaagcctggactgcgtggtggttccgcttggagtgtttgttctgctcaagtaatacaggtactggtcgatgagaggattcatgagacggtccaaactctggctgtgagcgtagctgctgtggaaaggaacatcctcaaaggtgtagctgaaggtaaagttgtttccggtacgcagcatctgagaagggaagtactccaggcagtaaaatgaagagcgtcctactgcctgactcccgttgttcagggtgaggtatccatactgtggcaccatgaagacgtctgctgggaacggcgggaggcatccttgatgcgccgagccgaggacgtacgggagctggtactccgagtcagtaaacacctgaaccgtgctggtaaggttattggcaatcgtcgtcgtaccatcattctgcgtgacctctctgacttgaatgttaaagagcttgaagttgagtctcttgggccggaatccccagttgttgttgatgagtctttgccagtcacgtggtgaaaagtggcagtggaatctgttgaagtcaaaatacccccaaggggtgctgtagccaaagtagtggttgtcgttgctggctcctgattggctggaaatctgcttgtacagatggttgttgtaggtgggcagagcccaggttcgggtgctggtggtgatgactctgtcgcccatccatgtggaatcgcaatgccaatttcccgaggaattacccactccgtcggcgccatcgttattgtctgccattggtgcgccactgcctgtagccatcgtattagttcccagaccagagggggctgctggtggctgtccgagaggctgggggtcaggtacggagtctgcgtctccagtctgaccgaaattcaatctctttcttgcaggctggttgcccgcttttccggttcccgaggaggagtctggctccacaggagagtgctctaccggcctcttttttcccggagccgtcttaacaggctcctcaaccaggcccagaggttcaagaaccctcttttttgcctggaagactgctcgtccgaggttgcccccaaaagacgtatcttctttaaggcgctcctgaaactccgcgtcggcgtggtcgtacttgaggtacgggttgtctccgctgtcgagctgccggtcgtaggccttgtcgtgctcgagggccgcggcgtctgcctcgttgaccggctctcccttgtcgagtccgttgaagggtccgaggtacttgtacccaggaagcacaagacccctgctgtcgtccttatgccgctctgcgggctttggtggtggtgggccaggtttgagcttccaccactgtcttattccttcagagagagtgtcctcgagccaatctggaagataaccatcggcagccatacctgatttaaatcatttattgttcagagatgcagtcatccaaatccacattgaccagatcgcaggcagtgcaagcgtctggcacctttcccatgatatgatgaatgtagcaaagtttctgatacgcctttttgacgacagaaacgggttgagattctgacacgggaaagcactctaaacagtctttctgtccgtgagtgaagcagatatttgaattctgattcattctctcgcattgtctgcagggaaacagcatcagattcatgcccacgtgacgagaacatttgttttggtacctgtccgcgtagttgatcgaagcttccgcgtctgacgtcgatggctgcgcaactgactcgcgcgcccgtttgggctcacttatatctgcgtcactgggggcgggtcttttcttggctccaccctttttgacgtagaattcatgctccacctcaaccacgtgatcctttgcccaccggaaaaagtctttcacttcctgcttggtgaccttcccaaagtcatgatccagacggcgggttagttcaaatttgaacatccggtcttgcaacggctgctggtgttcgaaggtcgttgagttcccgtcaatcacggcgcacatgttggtgttggaggtggcgatcacgggagtcgggtctatctgggccgaggacttgcacttttggtccacgcgcaccttgcttcctccgagaatggcttcggccgattccacgaccttggcggtcatctttccctcctcccaccagatcaccatcttgtcgacacagtcgttgaagggaaagttctcattggtccagttgacgcagcaagggcgaattcgtttaaacctgcaggaactagtcccttagtgagg

SEQ ID NO: 220 - protein, 735 aa, Adeno-associated virus
MAADGYLPDWLEDTLSEGIRQWWKLKPGPPPPKPAERHKDDSRGLVLPGYKYLGPFNGLYKGEPVNEADAAALEHDKAYDRQLDSGDNPYLKYNHAGAEFQERLKEDTSFGGNLGRAVFQAKKRVLEPLGLVEEPVKTAPGKKRPVEHSPVEPDSSSGTGKAGNQPARKRLNFGQTGDADSVPDPQPLGQPPAAPSGLGSTTMATGSGAPVADNNEGADGVGNSSGNWHCDSQWLGDRVITTSTRTWALPTYNNHLYKQISSQSGASNDNHYFGYSTPWGYFDFNRFHCHFSPRDWQRLINNNWGFRPKRLNFKLFNIQVKEVTQNDGTTTIANNLTSTVQVFTDSEYQLPYVLGSAHQGCLPPFPADVFMVPQYGYLTLNNGSQAVGRSSFYCLEYFPSQMLRTGNNFQFSYTFEDVPFHSSYAHSQSLDRLMNPLIDQYLYYLNKTQSNSGTLQQSRLLFSQAGPTSMSLQAKNWLPGPCYRQQRLSKQANDNNNSNFPWTAATKYHLNGRDSLVNPGPAMASHKDDEEKFFPMHGTLIFGKQGTNANDADLDNVMITDEEEIRTTNPVATEQYGYVSNNLQDSNTGPTTGTVNHQGALPGMVWQDRDVYLQGPIWAKIPHTDGHFHPSPLMGGFGLKHPPPQIMIKNTPVPANPPTNFSSAKFASFITQYSTGQVSVEIEWELQKENSKRWNPEIQYTSNYNKSVNVDFTVDTNGVYSEPRPIGTRYLTRNL

SEQ ID NO: 221 - DNA, 2208 bp, Adeno-associated virus
atggctgccgatggttatcttccagattggctcgaggacactctctctgaaggaataagacagtggtggaagctcaaacctggcccaccaccgccaaagcccgcagagcggcataaggacgacagcaggggtcttgtgcttcctgggtacaagtacctcggacccttcaacggactctacaagggagagccggtcaacgaggcagacgccgcggccctcgagcacgacaaggcctacgaccggcagctcgacagcggagacaacccgtacctcaagtacaaccacgccggcgcggagtttcaggagcgccttaaagaagatacgtcttttgggggcaacctcggacgagcagtcttccaggccaaaaagagggttcttgaacctctgggcttggttgaggagcctgttaaaacggctccgggaaaaaagaggccggtagagcactctcctgtggagccagactcctcctcgggaaccggaaaagcgggcaaccagcctgcaagaaaaagattgaattttggtcagactggagacgcagactccgtacctgacccccagcctctcggacagccaccagcagccccctctggtctgggatctactacaatggctacaggcagtggcgcaccagtggcagacaataacgagggtgccgatggagtgggtaattcctcaggaaattggcattgcgattcccaatggctgggcgacagagtcatcaccaccagcacccgaacctgggctctgcccacctacaacaaccacctctacaagcaaatctccagccaatcaggagcctcaaacgacaaccactactttggctacagcaccccctgggggtattttgacttcaacagattccactgccacttttcaccacgtgactggcaaagactcatcaacaacaactggggattccgaccaaagagactcaacttcaagctctttaacattcaagtcaaagaggtcacgcagaatgacggtacgacgacgattgccaataaccttaccagcacggttcaggtgtttactgactcggagtaccagctcccgtacgtcctcggctcggcgcatcaaggatgcctcccgccgttcccagcagacgtcttcatggtgccacagtatggatacctcaccctgaacaacgggagtcaggcggtaggacgctcttccttttactgcctggagtactttccttctcagatgctgcgtactggaaacaactttcagttcagctacacctttgaagacgttcctttccacagcagctacgctcacagccagagtctggatcggctgatgaatcctctgatcgaccagtacctgtattatctgaacaagacacaatcaaatagtggaacccttcagcagtctcggctactgtttagccaagctggacccaccagcatgtctcttcaagctaaaaactggctgcctggaccttgctacagacagcagcgtctgtcaaagcaggcaaacgacaacaacaacagcaactttccctggactgcggctacaaagtatcatctaaatggccgggactcgttggttaatccaggaccagctatggccagccacaaagacgatgaagaaaagtttttccccatgcatggaaccctgatatttggtaaacaaggaacaaatgctaacgacgcggatttggacaatgtcatgattacagatgaagaagaaatccgcaccaccaatcccgtggctacggagcagtacggatatgtgtcaaataatttgcaagactcaaatactggtccaactactggaactgtcaatcaccaaggagcgttacctggtatggtgtggcaggatcgagacgtgtacctgcagggacccatttgggccaagattcctcacaccgatggacactttcatccttctccacttatgggaggttttggactcaaacacccacctcctcagatcatgattaaaaacactcccgttccagccaatcctcccacaaacttcagttctgccaagtttgcttctttcatcacacagtattccacgggacaagtcagcgtagagatcgagtgggagctgcagaaggagaacagcaaacgctggaaccccgagatccagtacacttccaactataacaaatctgttaatgtggactttactgtggacactaatggtgtgtattcagagcctcgccccattggcaccagatacctgactcgtaatctgtaa

SEQ ID NO: 222 - protein, 738 aa, Adeno-associated virus
MAADGYLPDWLEDNLSEGIREWWDLKPGAPKPKANQQKQDDGRGLVLPGCKYLGPFNGLDKGEPVNAADAAALEHDKAYDQQLKAGDNPYLRYNHADAEFQERLQEDTSFGGNLGRAVFQAKKRVLEPLGLVEEGAKTAPGKKRPVEPSPQRSPDSSTGIGKTGQQPAKKRLNFGQTGDSESVPDPQPIGEPPAGPSGLGSGTMAAGGGAPMADNNEGADGVGSSSGNWHCDSTWLGDRVITTSTRTWALPTYNNHLYKQISNGTSGGSTNDNTYFGYSTPWGYFDFNRFHCHFSPRDWQRLINNNWGFRPKRLNFKLFNIQVKEVTQNEGTKTIANNLTSTIQVFTDSEYQLPYVLGSAHQGCPPPFPADVFMIPQYGYLTLNNGSQAVGRSSFYCLEYFPSQMRRTGNNFEFSYQFEDVPFHSSYAHSQSLDRLMNPLIDQYLYYLSRTQSTGGTAGTQQLLFSQAGPNNMSAQAKNWLPGPCYRQQRVSTTLSQNNNSNFAWTGATKYHLNGRDSLVNPGVAMATHKDDEERFFPSSGVLMFGKQGAGKDNVDYSSVMLTSEEEIKTTNPVATEQYGVVADNLQQQNAAPIVGAVNSQGALPGMVWQNRDVYLQGPIWAKIPHTDGNFHPSPLMGGFGLKHPPPQILIKNTPVPADPPTTFSQAKLASFITQYSTGQVSVEIEWELQKENSKRWNPEIQYTSNYNKSVNVDFTVDTNGVYSEPRPIGTRYLTRNL

SEQ ID NO: 223 - DNA, 2217 bp, Adeno-associated virus
atggctgccgatggttatcttccagattggctcgaggacaacctctctgagggcattcgcgagtggtgggacttgaaacctggagccccgaaacccaaagccaaccagcaaaagcaggacgacggccggggtctggtgcttcctggctgcaagtacctcggacccttcaacggactcgacaagggggagcccgtcaacgcggcggacgcagcggccctcgagcacgacaaggcctacgaccagcagctcaaagcgggtgacaatccgtacctgcggtataaccacgccgacgccgagtttcaggagcgtctgcaagaagatacgtcttttgggggcaacctcgggcgagcagtcttccaggccaagaagcgggttctcgaacctctcggtctggttgaggaaggcgctaagacggctcctggaaagaagagaccggtagagccatcaccccagcgttctccagactcctctacgggcatcggcaagacaggccagcagcccgcgaaaaagagactcaactttgggcagactggcgactcagagtcagtgcccgaccctcaaccaatcggagaaccccccgcaggcccctctggtctgggatctggtacaatggctgcaggcggtggcgctccaatggcagacaataacgaaggcgccgacggagtgggtagttcctcaggaaattggcattgcgattccacatggctgggcgacagagtcatcaccaccagcacccgaacctgggccctccccacctacaacaaccacctctacaagcaaatctccaacgggacatcgggaggaagcaccaacgacaacacctacttcggctacagcaccccctgggggtattttgactttaacagattccactgccacttctcaccacgtgactggcagcgactcatcaacaacaactggggattccggcccaagagactcaacttcaagctcttcaacatccaggtcaaggaggtcacgcagaatgaaggcaccaagaccatcgccaataaccttaccagcacgattcaggtctttacggactcggaataccagctcccgtacgtcctcggctctgcgcaccagggctgcccgcctccgttcccggcggacgtcttcatgattcctcagtacgggtacctgactctgaacaacggcagtcaggccgtgggccgttcctccttctactgcctggagtactttccttctcaaatgcggagaacgggcaacaactttgagttcagctaccagtttgaggacgtgccttttcacagcagctacgcgcatagccaaagcctggaccggctgatgaaccccctcatcgaccagtacctgtactacctgtctcggactcagtccacgggaggtaccgcaggaactcagcagttgctattttctcaggccgggcctaataacatgtcggctcaggccaaaaactggctacccgggccctgctaccggcagcaacgcgtctccacgacactgtcgcaaaataacaacagcaactttgcttggaccggtgccaccaagtatcatctgaatggcagagactctctggtaaatcccggtgtcgctatggcaacgcacaaggacgacgaagagcgattttttccatccagcggagtcttgatgtttgggaaacagggagctggaaaagacaacgtggactatagcagcgttatgctaaccagtgaggaagaaatcaaaaccaccaacccagtggccacagaacagtacggcgtggtggccgataacctgcaacagcaaaacgccgctcctattgtaggggccgtcaacagtcaaggagccttacctggcatggtctggcagaaccgggacgtgtacctgcagggtcctatctgggccaagattcctcacacggacggcaactttcatccttcgccgctgatgggaggctttggactgaaacacccgcctcctcagatcctgattaagaatacacctgttcccgcggatcctccaactaccttcagtcaagccaagctggcgtcgttcatcacgcagtacagcaccggacaggtcagcgtggaaattgaatgggagctgcagaaagagaacagcaagcgctggaacccagagattcagtatacttccaactataacaaatctgttaatgtggactttactgtggacactaatggtgtgtattcagagcctcgccccattggcaccagatacctgactcgtaatctgtaa

SEQ ID NO: 224 - DNA, 3167 bp, Adeno-associated virus
attgaatttagcggccgcgaattcgcccttcgcagagaccaaagttcaactgaaacgaattaaacggtttattgattaacaagcaattacagattacgagtcaggtacctggtgccaatggggcgaggctctgaatacacaccattagtgtccacagtaaagtccacattaacagatttgttgtagttggaagtgtactgaatctcgggattccagcgtttgctgttctccttctgcagctcccactcgatctccacgctgacctgccccgtggagtactgtgtaatgaaggaagcaaactttgccgcactgaaggtagtcgaaggattcgcaggtaccggggtgttcttgatgagaatctgcgggggagggtgtttaagtccgaatccgcccatgaggggagaggggtgaaaatgtccgtccgtgtgtggaatctttgcccagatgggcccctgcaggtacacgtctctgtcctgccacaccatgcctggaagaacgccttgtgtgttgacatctgaggtagctgcttgtgtgttgccgctctggaggttggtagatacagaaccatactgctccgtagccacgggattggtggtcctgatttcctcttcgtctgtaatcatgaccttttcaatgtccacattagtttttcccgagtcttgttttccaaagatgagaaccccgctctgaggaaaaaacttttcttcatcgtccttgtggctggccatggccgggcccggattcaccagagagtctcttccattaaggtggtacttggtagctccagtccacgagtattcactgttgttgttatccgcagatgtctttgatactcgctgctggcggtaacagggtccaggaagccagttcctagactggtcccgaatgtcacttgctccggcctgagaaaactgaagccttgactgcgtggtggttccgcttggagtgtttgttctgctcaagtaatacaggtactggtcgatgagaggattcatgagacggtccaaactctggctgtgggcgtagctgctgtggaaaggaacgtcctcaaaggtgtagctgaaggtaaagttgtttccggtacgcagcatctgagaaggaaagtactccaggcagtaaaatgaagagcgtcctactgcctgactcccgttgttcagggtgaggtatccatactgtggcaccatgaagacgtctgctgggaacggcgggaggcatccttgatgcgccgagccgaggacgtacgggagctggtactccgagtcagtaaacacctgaaccgtgctggtaaggttattggcaatcgtcgtcgtaccgtcattctgcgtgacctccttgacttgaatgttaaagagcttgaagttgagtcttttgggccggaatccccaattgttgttgatgagtctttgccagtcacgtggcgaaaagtggcagtggaatctgttgaagtcaaaatacccccaaggggtgctgtagccaaagtagtggttgtcgtttgaggctcctgattggctggaaatctgcttgtagaggtggttgttgtaggtgggcagagcccaggtgcgggtgctggtggtgatgactctgtcgcccatccatgtggaatcgcaatgccaatttcccgaggaattacccactccgtcggcgccctcgttattgtctgccattggtgcgccactgcctgtagccatcgtattagttcccagaccagagggggctgctggtggctgtccgagaggctgggggtcaggtacggagtctgcgtctccagtctgaccgaaattcaatctctttcttgcaggctgctggcccgcttttccggttcccgaggaggagtctggctccgcaggagagtgctctaccggcctcttttttcccggagccgtcttaacaggttcctcaaccaggcccagaggttcaagaaccctctttttcgcctggaagactgctcgtccgaggttgcccccaaaagacgtatcttctttaagacgctcctggaactccgcgtcggcgtggttgtacttggggtacgggttgtctccgctgtcgagctgccggtcgtaggccttgtcgtgctcgagggccgcggcgtctgcctcgttgaccggctctcccttgtcgagtccgttgaagggtccaaggtacttgtacccaggaagcacaagacccctgctgtcgtccttatgccgctctgcgggctttggtggtggtgggccaggtttgagcttccaccactgtcttattccttcagagagagtgtcctcgagccaatctggaagataaccatcggcagccatacctgatttaaatcatttattgttcagagatgcagtcatccaaatccacattgaccagatcgcaagcagtgcaagcgtctggcacctttcccatgatatgatgaatgtagcacagtttctgatacgcctttttgacgacagaaacgggttgagattctgacacgggaaagcactctaaacagtctttctgtccgtgagtgaagcagatatttgaattctgattcattctctcgcattgtctgcagggaaacagcatcagattcatgcccacgtgacgagaacatttgttttggtacctgtccgcgtagttgattgaagcttccgcgtctgacgtcgatggctgcgcaactgactcgcgcgcccgtttgggctcacttatatctgcgtcactgggggcgggtctttttttggctccaccctttttgacgtagaattcatgctctacctcaaccacgtgatcctttgcccaccggaaaaagtctttgacttcctgcttggtgaccttcccaaagtcatgatccagacggcgggtgagttcaaatttgaacatccggtcttgcaacggctgctggtgttcgaaggtcgttgagttcccgtcaatcactgcgcacatgttggtgttggaggtgacaatcacgggagtcgggtctatctgggccgaggacttgcatttctggtccacgcgcaccttgcttcctccgagaatggctttggccgactccacgaccttggcggtcatcttcccctcctcccaccagatcaccatcttgtcgacgcaatcattgaaaggaaagttctcattggtccagttgacgcagccgtagaaagggcgaattcgtttaaacctgcaggactagtccctttagtgagggt

SEQ ID NO: 225 - DNA, 3161 bp, Adeno-associated virus
aattgaatttagcggccgcgaattcgcccttcgcagagaccaaagttcaactgaaacgaattaaacggtttattgattaacaagcaattacagattacgagtcaggtatctggtgccaatggggcgaggctctgaatacacaccattagtgtccacagtaaagtccacattaacagatttgttgtagttggaagtgtactgaatctcgggattccagcgtttgctgttctccttctgcagctcccactcgatctccacgctgacctgccccgtggagtactgtgtaatgaaggaagcaaactttgccgcactgaaggtagtcgaaggattcgcaggtaccggggtgttcttgatgagaatctgcgggggagggtgtttaagtccgaatccgcccatgaggggagaggggtgaaaatgtccgtccgtgtgtggaatctttgcccagatgggcccctgcaggtacacgtctctgtcctgccacaccatgcctggaagaacgccttgtgtgttgacatctgaggtagctgcttgtgtgttgccgctctggaggttggtagatacagaaccatactgctccgtagccacgggattggtggtcctgatttcctcttcgtctgtaatcatgaccttttcaatgtccacattagtttttcccgagtcttgttttccaaagatgagaaccccgctctgaggaaaaaacttttcttcatcgtccttgtggctggccatggccgggcccggattcaccagagagtctcttccattaaggtggtacttggtagctccagtccacgagtattcactgttgttgttatccgcagatgtctttgatactcgctgctggcggtaacagggtccaggaagccagttcctagactggtcccgaatgtcacttgctccggcctgagaaaactgaagccttgactgcgtggtggttccgcttggagtgtttgttctgctcaagtaatacaggtactggtcgacgagaggattcatgagacggtccaaactctggctgtgggcgtagctgctgtggaaaggaacgtcctcaaaggtgtagctgaaggtaaagttgtttccggtacgcagcatctgagaaggaaagtactccaggcagtaaaatgaagagcgtcctactgcctgactcccgttgttcagggtgaggtatccatactgtggcaccatgaagacgtctgctgggaacggcgggaggcatccttgatgcgccgagccgaggacgtacgggagctggtactccgagtcagtaaacacctgaaccgtgctggtaaggttattggcaatcgtcgtcgtaccgtcattctgcgtgacctccttgacttgaatgttaaagagcttgaagttgagtcttttgggccgggatccccaattgttgttgatgagtctttgccagtcacgtggcgaaaagtggcagtggaatctgttgaagtcaaaatacccccaaggggtgctgtagccaaagtagtggttgtcgtttgaggctcctgattggctggaaatctgcctgtagaggtggttgttgtaggtgggcagagcccaggtgcgggtgctggtggtgatgactctgtcgcccatccatgtggaatcgcaatgccaatttcccgaggaattacccactccgtcggcgccctcgttattgtctgccattggtgcgccactgcctgtagccatcgtattagttcccagaccagagggggctgctggtggctgtccgagaggctgggggtcaggtacggagtctgcgtctccagtctgaccgaaattcaatctccttcttgcaggctgctggcccgcttttccggttcccgaggaggagtctggctccgcaagagagtgctctaccggcctcttttttcccggagccgtcttaacaggttcctcaaccaggcccagaggttcaagaaccctctttttcgcctggaagactgctcgtccgaggttgcccccaaaagacgtatcttctttaagacgctcctggaactccgcgtcggcgtggttgtacttgaggtacgggttgtctccgccgtcgagctgccggtcgtaggccttgtcgtgctcgagggccgcggcgtctgcctcgttgaccggctctcccttgtcgagtccgttgaagggtccaaggtacttgtacccaggaagcacaagacccctgctgtcgtccttatgccgctctgcgggctttggtggtggtgggccaggtttgagcttccaccactgtcttattccttcagagagagtgtcctcgagccaatctggaagataaccatcggcagccatacctgatttaaatcatttattgttcagagatgcagtcatccaaatccacattgaccagatcgcaagcagtgcaagcgtctggcacctttcccatgatatgatgaatgtagcacagtttctgatacgcctttttgacgacagaaacgggttgagattctgacacgggaaagcactctaaacagtctttctgtccgtgagtgaagcagatatttgaattctgattcattctctcgcattgtctgcagggaaacagcatcagattcatgcccacgtgacgagaacatttgttttggtacctgtccgcgtagttgattgaagcttccgcgtctgacgtcgatggctgcgcaactgactcgcgcgcccgtttgggctcacttatatctgcgtcactgggggcgggtctttttttggctccaccctttttgacgtagaattcatgctctacctcaaccacgtgatcctttgcccaccggaaaaagtctttgacttcctgcttggtgaccttcccaaagtcatgatccagacggcgggtgagttcaaatttgaacatccggtcttgcaacggctgctggtgttcgaaggtcgttgagttcccgtcaatcactgcgcacatgttggtgttggaggtgacaatcacgggagtcgggtctatctgggccgaggacttgcatttctggtccacgcgcaccttgcttcctccgagaatggctttggccgactccacgaccttggcggtcatcttcccctcctcccaccagatcaccatcttgtcgacgcaatcattgaaaggaaagttctcattggtccagttgacgcagcaagggcgaattcgtttaaacctgcaggactagtccctttagtgaggg

SEQ ID NO: 226 - DNA, 3172 bp, Adeno-associated virus
gattgaatttagcggccgcgaattcgcccttgctgcgtcaactggaccaatgagaactttcccttcaacgattgcgtcgacaagatggtgatctggtgggaggagggcaagatgaccgccaaggtcgtggagtccgccaaggccattctgggtggaagcaaggtgcgcgtggaccaaaagtgcaagtcatcggcccagatcgaccccacgcccgtgatcgtcacctccaacaccaacatgtgcgccgtgatcgacgggaacagcaccaccttcgagcaccagcagcccctgcaggaccgcatgttcaagttcgagctcacccgccgtctggagcacgactttggcaaggtgaccaagcaggaagtcaaagagttcttccgctgggctcaggatcacgtgactgaggtggcgcatgagttctacgtcagaaagggcggagccaccaaaagacccgcccccagtgacgcggatataagcgagcccaagcgggcctgcccctcagttgcggagccatcgacgtcagacgcggaagcaccggtggactttgcggacaggtaccaaaacaaatgttctcgtcacgcgggcatgcttcagatgctgtttccctgcaagacatgcgagagaatgaatcagaatttcaacgtctgcttcacgcacggggtcagagactgctcagagtgcttccccggcgcgtcggaatctcaacccgtcgtcagaaaaaagacgtatcagaaactgtgcgcgattcatcatctgctggggcgggcacccgagattgcgtgttcggcctgcgatctcgtcaacgtggacttggatgactgtgtttctgagcaataaatgacttaaaccaggtatggctgctgacggttatcttccagattggctcgaggacaacctctctgagggcattcgcgagtggtgggacctgaaacctggagcccccaagcccaaggccaaccagcagaagcaggacgacggccggggtctggtgcttcctggctacaagtacctcggacccttcaacggactcgacaagggggagcccgtcaacgcggcggacgcagcggccctcgagcacgacaaggcctacgaccagcagctcaaagcgggtgacaatccgtacctgcggtataaccacgccgacgccgagtttcaggagcgtctgcaagaagatacgtcttttgggggcaacctcgggcgagcagtcttccaggccaagaagcgggttctcgaacctctcggtctggttgaggaagctgctaagacggctcctggaaagaagagaccggtagaaccgtcacctcagcgttcccccgactcctccgcgggcatcggcaagaaaggccagcagcccgctaaaaagagactgaactttggtcagactggcgactcagagtcagtccccgaccctcaaccaatcggagaaccaccagcaggcccctctggtctgggatctggtacaatggctgcaggcggtggcgctccaatggcagacaataacgaaggcgccgacggagtgggtagttcctcaggaaattggcattgcgattccacatggctgggcgacagagtcatcaccaccagcacccgaacctgggccctgcccacctacaacaaccacctctacaagcaaatatccaatgggacatcgggaggaagcaccaacgacaacacctacttcggctacagcaccccctgggggtattttgacttcaacagattccactgccacttctcaccacgtgactggcagcgactcatcaacaacaactggggattccggccaaaaagactcagcttcaagctcttcaacatccaggtcaaggaggtcacgcagaatgaaggcaccgagaccatcgccaataaccttaccagcacgattcaggtatttacggactcggaataccagctgccgtacgtcctcggctccgcgcaccagggctgcctgcctccgttcccggcggacgtcttcatgattccccagtacggctaccttacactgaacaatggaagtcaagccgtaggccgttcctccttctactgcctggaatattttccatctcaaatgctgcgaactggaaacaattttgaattcagctacaccttcgaggacgtgcctttccacagcagctgcgcacacagccagagctcggaccgactgatgaatcctctcatcgaccagtacctgtactacttatccagaactcggtccacaggaggaactcaaggtacccagcaattgttattttctcaagctgggcctgcaaacatgtcggctcaggctaagaactggctacctggaccttgctaccggcagcagcgagtctctacgacactgtcgcaaaacaacaacagcaactttgcttggactggtgccaccaaatatcacctgaacggaagagactctttggtaaatcccggtgtcgccatggcaacccacaaggacgacgaggaacgcttcttcccgtcgagtggagtcctgatgtttggaaaacagggtgctggaagagacaatgtggactacagcagcgttatgctaaccagcgaagaagaaattaaaaccactaaccctgtagccacagaacaatacggtgtggtggctgacaacttgcagcaaaccaatacagggcctattgtgggaaatgtcaacagccaaggagccttacctggcatggtctggcagaaccgagacgtgtacctgcagggtcccatctgggccaagattcctcacacggacggcaacttccacccttcaccgctaatgggaggatttggactgaagcacccacctcctcagatcctgatcaagaacacgccggtacctgcggatcctccaacaacgttcagccaggcgaaattggcttccttcattacgcagtacagcaccggacaggtcagcgtggaaatcgagtgggagctgcagaaggagaacagcaaacgctggaacccagagattcagtacacttcaaactactacaaatctacaaatgtggactttgctgtcaatacagagggaacttattctgagcctcgccccattggtactcgttacctcacccgtaatctgtaattgctggttaatcaataaaccgtttgattcgtttcagttgaactttggtctctgcgaagggcgaattcgtttaaacctgcaggactagtccctttagtgagg

SEQ ID NO: 227 - DNA, 3172 bp, Adeno-associated virus
gattgaatttagcggccgcgaattcgcccttgctgcgtcaactggaccaatgagaactttcccttcaacgattgcgtcgacaagatggtgatctggtgggaggagggcaagatgaccgccaaggtcgtggagtccgccaaggccattctgggtggaagcaaggtgcgcgtggaccaaaagtgcaagtcatcggcccagatcgaccccacgcccgtgatcgtcacctccaacaccaacatgtgcgccgtgatcggcgggaacagcaccaccttcgagcaccagcagcccctgcaggaccgcatgttcaagttcgagctcacccgccgtctggagcacgactttggcaaggtgaccaagcaggaagtcaaagagttcttccgctgggctcaggatcacgtgactgaggtggcgcatgagttctacgtcagaaagggcggagccaccaaaagacccgcccccagtgacgcggatataagcgagcccaagcgggcctgcccctcagttgcggagccatcgacgtcagacgcggaagcaccggtggactttgcggacaggtaccaaaacaaatgttctcgtcacgcgggcatgcttcagatgctgtttccctgcaagacatgcgagagaatgaatcagaatttcaacgtctgcttcacgcacggggtcagagactgctcagagtgcctccccggcgcgtcagaatctcaacccgtcgtcagaaaaaagacgtatcagaaactgtgcgcgattcatcatctgctggggcgggcacccgagattgcgtgttcggcctgcgatctcgtcaacgtggacttggatgactgtgtttctgagcaataaatgacttaaaccaggtatggctgctgacggttatcttccagattggctcgaggacaacctctctgagggcattcgcgagtggtgggacctgaaacctggagcccccaagcccaaggccaaccagcagaagcaggacgacggccggggtctggtgcttcttggctacaagtacctcggacccttcaacggactcgacaagggggagcccgtcaatgcggcggacgcagcggccctcgagcacgacaaggcctacgaccagcagctcaaagcgggtgacaatccgtacctgcggtataaccacgccgacgccgagtttcaggagcgtctgcaagaagatacgtcttttgggggcaacctcgggcgagcagtcttccaggccaagaagcgggttctcgaacctctcggtctggttgaggaagctgctaagacggctcctggaaagaagagaccggtagaaccgtcacctcagcgttcccccgactcctccacgggcatcggcaagaaaggccagcagcccgctaaaaagagactgaactttggtcagactggcgactcagagtcagtccccgaccctcaaccaatcggagaaccaccagcaggcccctctggtctgggatctggtacaatggctgcaggcggtggcgctccaatggcagacaataacgaaggcgccgacggagtgggtagttcctcaggaaattggcattgcgattccacatggctgggcgacagagtcatcaccaccagcacccgaacctgggccctgcccacctacaacaaccacctctacaagcaaatatccaatgggacatcgggaggaagcaccaacgacaacacctacttcggctacagcaccccctgggggtattttgacttcaacagattccactgccacttctcaccacgtgactggcagcgactcatcaacaacaactggggattccggccaaaaagactcagcttcaagctcttcaacatccaggtcaaggaggtcacgcagaatgaaggcaccaagaccatcgccaataaccttaccagcacgattcaggtatttacggactcggaataccagctgccgtacgtcctcggctccgcgcaccagggctgcctgcctccgttcccggcggacgtcttcatgattccccagtacggctaccttacactgaacaatggaagtcaagccgtaggccgttcctccttctactgcctggaatattttccatctcaaatgctgcgaactggaaacaattttgaattcagctacaccttcgaggacgtgcctttccacagcggctacgcacacagccagagcttggaccgactgatgaatcctctcatcgaccagtacctgtactacttatccagaactcagtccacaggaggaactcaaggtacccagcaattgttattttctcaagctgggcctgcaaacatgtcggctcaggctaagaactggctacctggaccttgctaccggcagcagcgagtctctacgacactgtcgcaaaacaacaacagcaactttgcttggactggtgccaccaaatatcacctgaacggaagagactctttggtaaatcccggtgtcgccatggcaacccacaaggacgacgaggaacgcttcttcccgtcgagtggagtcctgatgtttggaaaacagggtgctggaagagacaatgtggactacagcagcgttatgctaaccagcgaagaagaaattaaaaccactaaccctgtagccacagaacaatacggtgtggtggctgacaacttgcagcaaaccaatacagggcctattgtgggaaatgtcaacagccaaggagccttacctggcatggtctggcagaaccgagacgtgtacctgcagggtcccatctgggccaagattcctcacacggacggcaacttccacccttcaccgctaatgggaggatttggactgaagcacccacctcctcagatcctgatcaagaacacgccggtacctgcggatcctccaacgacgttcagccaggcgaaattggcttccttcattacgcagtacagcaccggacaggtcagcgtggaaatcgagtgggagctgcagaaggagaacagcaaacgctggaacccagagattcagtacacttcaaactactacaaatctacaaatgtggactttgctgtcaatacagagggaacttattctgagcctcgccccattggtactcgttacctcacccgtaatctgtaattgctggttaatcaataaaccgtttgattcgtttcagttgaactttggtctctgcgaagggcgaattcgtttaaacctgcaggactagtccctttagtgagg

SEQ ID NO: 228 - DNA, 2208 bp, Adeno-associated virus
atggctgccgatggttatcttccagattggctcgaggacactctctctgaaggaataagacagtggtggaagctcaaacctggcccaccaccaccaaagcccgcagagcggcataaggacgacagcaggggtcttgtgcttcctgggtacaagtacctcggacccttcaacggactcgacaagggagagccggtcaacgaggcagacgccgcggccctcgagcacgacaaggcctacgaccggcagctcgaaagcggagacaacccgtacctcaagtacaaccacgccgacgcggagtttcaggagcgtcttaaagaagatacgtcttttgggggcaacctcggacgagcagtcttccaggcgaaaaagagggttcttgaacctctgggcctggttgaggagcctgttaaaacggctccgggaaaaaagaggccggtagagcactctcctgtggagccagactcctcctcgggaaccggaaaagcgggccagcagcctgcgagaaaaagattgaattttggtcagactggagacgcagactccgtacctgacccccagcctctcggacagccaccagcagccccctctggtctgggatctactacaatggcttcaggcagtggcgcaccagtggcagacaataacgagggtgccgatggagtgggtaattcctcaggaaattggcattgcgattcccaatggctgggcgacagagtcatcaccaccagcacccgaacctgggccctgcccacctacaacaaccacctctacaagcaaatctccagccaatcaggagcctcaaacgacaaccactactttggctacagcaccccctgggggtattttgacttcaacagattccactgccacttttcaccacgtgactggcaaagactcatcaacaacagctggggattccgacccaaaagactcaacttcaagctctttaacattcaagtcaaagaggtcacgcagaatgacggtacgacgacgattgccaataaccttaccagcacggttcaagtgtttaccgactcggagtaccagctcccgtacgtcctcggctcggcgcatcaaggatgcctcccgccgttcccagcagacgtctttatggtcccacagtatggatacctcaccctgaacaacgggagtcaggcggtaggacgctcttccttttactgcctggagtactttccttctcagatgctgcgtactggaaacaactttcagttcagctacacctttgaagacgttcccttccacagcagctacgctcacagccagagtctggatcggctgctgaatcctctgatcgaccagtacctatattatctgaacaagacacaatcaaatagtggaactcttcagcagtctcggctactgtttagccaagctggacccaccagcatgtctcttcaagctaaaaactggctgcctggaccttgctacagacagcagcgtctgtcaaagcaggcaaacgacaacaacaacagcaactttccctggactgcggctacaaagtatcatctaaatggccgggactcgttggttaatccaggaccagctatggccagccacaaagacgatgaagaaaagtttttccccatgcatggaaccctgatatttggtaaacaaggaacaaatgctaacgacgcggatttggacaatgtcatgattacagatgaagaagaaatccgcaccaccaatcccgtggctacggagcagtacggatatgtgtcaaataatttgcaaaactcaaatactggtccaactactggaactgtcaatcaccaaggagcgttacctggtatggtgtggcaggatcgagacgtgtacctgcagggacccatttgggccaagattcctcacacggacgggcactttcatccttctccactaatgggaggttttgggctcaaacacccgcctcctcagatcatgatcaaaaacactcccgttccagccaatcctcctacaaacttcagttcttccaagtttgcttctttcatcacacagtattccacggggcaggtcagcgtggagatcgagtgggagctgcagaaggagaacagcaaacgctggaatcccgaaattcagtatacttccaactacaacaaatctgttaatgtggactttactgtggacactaatggtgtgtattcagagcctcgccccattggcaccagatacccgactcgtaatctgtaa

SEQ ID NO: 229 - protein, 735 aa, Adeno-associated virus
MAADGYLPDWLEDTLSEGIRQWWKLKPGPPPPKPAERHKDDSRGLVLPGYKYLGPFNGLDKGEPVNEADAAALEHDKAYDRQLESGDNPYLKYNHADAEFQERLKEDTSFGGNLGRAVFQAKKRVLEPLGLVEEPVKTAPGKKRPVEHSPVEPDSSSGTGKAGQQPARKRLNFGQTGDADSVPDPQPLGQPPAAPSGLGSTTMASGSGAPVADNNEGADGVGNSSGNWHCDSQWLGDRVITTSTRTWALPTYNNHLYKQISSQSGASNDNHYFGYSTPWGYFDFNRFHCHFSPRDWQRLINNSWGFRPKRLNFKLFNIQVKEVTQNDGTTTIANNLTSTVQVFTDSEYQLPYVLGSAHQGCLPPFPADVFMVPQYGYLTLNNGSQAVGRSSFYCLEYFPSQMLRTGNNFQFSYTFEDVPFHSSYAHSQSLDRLLNPLIDQYLYYLNKTQSNSGTLQQSRLLFSQAGPTSMSLQAKNWLPGPCYRQQRLSKQANDNNNSNFPWTAATKYHLNGRDSLVNPGPAMASHKDDEEKFFPMHGTLIFGKQGTNANDADLDNVMITDEEEIRTTNPVATEQYGYVSNNLQNSNTGPTTGTVNHQGALPGMVWQDRDVYLQGPIWAKIPHTDGHFHPSPLMGGFGLKHPPPQIMIKNTPVPANPPTNFSSSKFASFITQYSTGQVSVEIEWELQKENSKRWNPEIQYTSNYNKSVNVDFTVDTNGVYSEPRPIGTRYPTRNL

SEQ ID NO: 230 - DNA, 2208 bp, Adeno-associated virus
atggctgccgatggttatcttccagattggctcgaggacactctctctgaaggaataagacagtggtggaagctcaaacctggcccaccaccaccaaagcccgcagagcggcataaggacgacagcaggggtcttgtgcttcctgggtacaagtacctcggacccttcaacggactcgacaagggagagccggtcaacgaggcagacgccgcggccctcgagcacgacaaggcctacgaccggcagctcgacagcggagacaacccgtacctcaagtacaaccacgccgacgcggagtttcaggagcgtcttaaagaagatacgtcttttgggggcaacctcggacgagcagtcttccaggccaaaaagaggattcttgaacctctgggcctggttgaggaacctgttaagacggctccgggagaaaagaggccggtagagcactctcctgcggagccagactcctcctcgggaaccggaaaagcgggccagcagcctgcaagaaagagattgaattttggccagactggagacgcagactcagtacctgacccccagcctctcggacagccaccagcagccccctctggtctgggaactaatacgatggcttcaggcagtggcgcaccaatggcagacaataacgagggcgccgacggagtgggtaattcctcgggaaattggtattgcgattccacatggatgggcgacagagtcatcaccaccagcacccgcacctgggccctgcccacctacaacaaccatctgtacaagcaaatctccagccagtctggagccagcaacgacaaccactactttggctacagcaccccctgggggtattttgacttcaacagattccactgccacttctccccacgtgactggcaaagactcatcaacaacaactggggattccggcccaagagactcagcttcaagctctttaacattcaagtcaaagaggtcacgcagaatgacggtacgacgacgattgccaataaccttaccagcacggttcaggtgtttactgactcggagtaccagctcccgtacgtcctcggctcggcgcatcaaggatgcctcccgccgttcccagcagacgtcttcatggtgccacagtatggatacctcaccctgaacaacggcagtcaggcggtaggacgctcttccttttactgcctggagtactttccttctcagatgcttcgtaccggaaacaactttaccttcagctacacctttgaagacgttcctttccatagcagctacgctcacagccaaagtctggaccgtctcatgaatcctctcatcgaccagtacctgtattacttgagcagaacaaacactccaagcggaaccaccacgatgtccaggcttcagttttctcaggccggagcaagtgacattcgggaccagtctagaaactggcttcctggaccctgttaccgccagcagcgagtatcaaagacagctgcggacaacaacaacagtgattactcgtggactggagctaccaagtaccacctcaatggaagagactctctggtgaatccgggcccagctatggccagccacaaggacgatgaagaaaaatattttcctcagagcggggttctcatctttggaaaacaagactcgggaaaaactaatgtggacattgaaaaggttatgattacagacgaagaggaaatcaggaccaccaatcccgtggctacggagcagtatggttctgtatctaccaacctccagagcggcaacacacaagcagctacctcagatgtcaacacacaaggcgttcttccaggcatggtctggcaggacagagacgtgtacctgcaggggcccatctgggcaaagattccacacacggacggacattttcacccctctcccctcgtgggcggattcggacttaaacaccctcctccacaaattctcatcaagaacaccccggtacctgcgaatccttcgaccactttcagtgcggcaaagtttgcttccttcatcacacagtactccacggggcaggtcagcgtggagatcgagtgggagctgcagaaggagaacagcaaacgctggaatcccgaaattcagtacacttccaactacaacaaatctgttaatgtggactttactgtggacactaatggtgtgtattcagagcctcgccccattggcaccagatacctgactcgtaatctgtaa

SEQ ID NO: 231 - protein, 735 aa, Adeno-associated virus
MAADGYLPDWLEDTLSEGIRQWWKLKPGPPPPKPAERHKDDSRGLVLPGYKYLGPFNGLDKGEPVNEADAAALEHDKAYDRQLDSGDNPYLKYNHADAEFQERLKEDTSFGGNLGRAVFQAKKRILEPLGLVEEPVKTAPGEKRPVEHSPAEPDSSSGTGKAGQQPARKRLNFGQTGDADSVPDPQPLGQPPAAPSGLGTNTMASGSGAPMADNNEGADGVGNSSGNWYCDSTWMGDRVITTSTRTWALPTYNNHLYKQISSQSGASNDNHYFGYSTPWGYFDFNRFHCHFSPRDWQRLINNNWGFRPKRLSFKLFNIQVKEVTQNDGTTTIANNLTSTVQVFTDSEYQLPYVLGSAHQGCLPPFPADVFMVPQYGYLTLNNGSQAVGRSSFYCLEYFPSQMLRTGNNFTFSYTFEDVPFHSSYAHSQSLDRLMNPLIDQYLYYLSRTNTPSGTTTMSRLQFSQAGASDIRDQSRNWLPGPCYRQQRVSKTAADNNNSDYSWTGATKYHLNGRDSLVNPGPAMASHKDDEEKYFPQSGVLIFGKQDSGKTNVDIEKVMITDEEEIRTTNPVATEQYGSVSTNLQSGNTQAATSDVNTQGVLPGMVWQDRDVYLQGPIWAKIPHTDGHFHPSPLVGGFGLKHPPPQILIKNTPVPANPSTTFSAAKFASFITQYSTGQVSVEIEWELQKENSKRWNPEIQYTSNYNKSVNVDFTVDTNGVYSEPRPIGTRYLTRNL

SEQ ID NO: 232 - DNA, 2209 bp, Adeno-associated virus
atggctgccgatggttatcctccagattggctcgaggacactctctctgaagggataagacagtggtggaagctcaaacctggcccaccaccaccaaagcccgcagagcggcataaggacgacagcaggggtcttgtgcttcctgggtacaagtacctcggacccttcaacggactcgacaagggggagccggtcaacgaggcagacgccgcggccctcgagcacgacaaggcctacgaccggcagctcgacagcggagacaacccgtacctcaagtacaaccacgccgacgcagagtttcaggagcgccttaaagaagatacgtcttttgggggcaacctcggacgagcagtcttccaggcgaaaaagagggttcttgaacctctgggcctggttgaggaacctgttaagacggctccgggaaaaaagaggccggtagagcactctcctgtggagccagactcctcctcgggaaccggaaaagcgggccagcggcctgcaagaaaaagattaaattttggtcagactggagacgcagactccgtacctgacccccagcctctcggacagccaccagcagccccctctggtctgggatctactacaatggctacaggcagtggcgcaccaatggcagacaataacgagggtgccgatggagtgggtaattcctcaggaaattggcattgcgattcccaatggctgggcgacagagtcatcaccaccagcacccgaacctgggccctgcccacatacaacaaccacctctacaagcaaatctccagccaatcaggagccagcaacgacaaccactactttggctacagcaccccctgggggtattttgacttcaacagattccactgccacttttcaccacgtgactggcaaagactcatcaacaacaactggggattccggcccaaaagactcaacttcaagctctttaatattcaagtcaaagaggtcacgcagaatgacggtacgacgacgattgccaataaccttaccagcacggttcaggtgtttactgactcggagtaccagctcccgtacgtcctgggctcggcgcatcaaggatgcctcccgccgtttccagcggacgtcttcatggtcccacagtatggatacctcaccctgaacaacgggagtcaggcggtaggacgctcttccttttactgcctggagtactttccttctcagatgctgcgtactggaaacaactttcagttcagctacacttttgaagacgtgcctttccacagcagctacgctcacagccagagtctggatcggctgatgaatcctctgatcgaccagtacctgtattatctgaacaagacacaaacaaatagtggaactcttcagcagtctcggctactgtttagccaagctggaccaaccaacatgtctcttcaagctaaaaactggctgcctggaccttgctacagacagcagcgtctgtcaaaacaggcaaacgacaacaacaacagcaactttccctggactgcagctacaaagtatcatctaaatggccgggactcgttggttaatccaggaccagctatggccagtcacaaggatgacgaagaaaagtttttccccatgcatggaaccctgatatttggtaaacaaggaacaaatgccaacgacgcggatttggaaaatgtcatgattacagatgaagaagaaatcagggccaccaatcccgtggctacggagcagtacgggactgtgtcaaataatttgcaaaactcaaacactggtccaactactggaactgtcaatcgccaaggagcgttacctggtatggtgtggcaggatcgagacgtgtacctgcagggacccatttgggccaagattcctcacaccgatggacactttcatccttctccactgatgggaggttttggactcaaacacccgcctcctcagatcatgatcaaaaacactcccgttccagccaatcctcccacaaacttcagttctgccaagtttgcttctttcatcacacagtattccacgggacaggtcagcgtggagatcgagtgggagctgcagaaggagaacagcaaacgctggaatcccgaaattcagtacacttccaactacaacaagtctgttaatgtggactttactgtggacactaatggtgtgtattcagagcctcgccccattggcaccagatacctgactcgtaatctgtaat

SEQ ID NO: 233 - protein, 735 aa, Adeno-associated virus
MAADGYPPDWLEDTLSEGIRQWWKLKPGPPPPKPAERHKDDSRGLVLPGYKYLGPFNGLDKGEPVNEADAAALEHDKAYDRQLDSGDNPYLKYNHADAEFQERLKEDTSFGGNLGRAVFQAKKRVLEPLGLVEEPVKTAPGKKRPVEHSPVEPDSSSGTGKAGQRPARKRLNFGQTGDADSVPDPQPLGQPPAAPSGLGSTTMATGSGAPMADNNEGADGVGNSSGNWHCDSQWLGDRVITTSTRTWALPTYNNHLYKQISSQSGASNDNHYFGYSTPWGYFDFNRFHCHFSPRDWQRLINNNWGFRPKRLNFKLFNIQVKEVTQNDGTTTIANNLTSTVQVFTDSEYQLPYVLGSAHQGCLPPFPADVFMVPQYGYLTLNNGSQAVGRSSFYCLEYFPSQMLRTGNNFQFSYTFEDVPFHSSYAHSQSLDRLMNPLIDQYLYYLNKTQTNSGTLQQSRLLFSQAGPTNMSLQAKNWLPGPCYRQQRLSKQANDNNNSNFPWTAATKYHLNGRDSLVNPGPAMASHKDDEEKFFPMHGTLIFGKQGTNANDADLENVMITDEEEIRATNPVATEQYGTVSNNLQNSNTGPTTGTVNRQGALPGMVWQDRDVYLQGPIWAKIPHTDGHFHPSPLMGGFGLKHPPPQIMIKNTPVPANPPTNFSSAKFASFITQYSTGQVSVEIEWELQKENSKRWNPEIQYTSNYNKSVNVDFTVDTNGVYSEPRPIGTRYLTRNL

SEQ ID NO: 234 - DNA, 2208 bp, Adeno-associated virus
atggctgccgatggttatcttccagattggctcgaggacactctctctgaaggaataagacagtggtggaagctcaaacctggcccaccaccaccaaagcccgcagagcggcataaggacgacagcaggggtcttgtgcttcctgggtacaggtacctcggacccttcaacggactcgacaagggagagccggtcaacgaggcagacgccgcggccctcgagcacgacaaggcctacgaccggcagctcgacagcggagacaacccgtacctcaagtacaaccacgtcgacgcggagtttcaggagcgtcttaaagaagatacgtcttttgggggcaacctcggacgagcagtcttccaggccaaaaagaggattcttgaacctctgggcctggttgaggaacctgttaaggcggctccgggagaaaagaggccggtagagcactctcctgcggagccagactcctcctcgggaaccggaaaagcgggccagcagcctgcaagaaagagattgaattttggtcagactggagacgcagactcagtacctgacccccagcctctcggacagccaccagcagccccctctggtctgggaactaatacgatggcttcaggcagtggcgcaccaatggcagacaataacgagggcgccgacggagtgggtaattcctcgggaaattggcattgcgattccacatggatgggcgacagagtcatcaccaccagcacccgcacctgggccctgcccacctacaacaaccatctgtacaagcaaatctccagccagtctggagccagcaacgacaaccactactttggctacagcaccccctgggggcattttgacttcaacagattccactgccacttctccccacgtgactggcaaagactcatcaacaacaactggggattccggcccaagagactcagcttcaagctctttaacattcaagtcaaagaggtcacgcagaatgacggtacgacgacgattgccaataaccttaccagcacggttcaggtgtttactgactcggagtaccagctcccgtacgtcctcggctcggcgcatcaaggatgcctcccgccgttcccagcagacgtcttcatggtgccacagtatggatacctcaccctgaacaacggcagtcaggcggtaggacgctcttccttttactgcctggagtactttccttctcagatgcttcgtaccggaaacaactttaccttcagctacacctttgaagacgttcctttccatagcagctacgctcacagccaaagtctggaccgtctcatgaatcctctcatcgaccagtacctgtattacttgagcagaacaaacactccaagcggaaccaccacgatgtccaggcttcagttttctcaggccggagcaagtgacattcgggaccagtctagaaactggcttcctggaccctgttaccgccagcagcgagtatcaaagacagctgcggacaacaacaacagtgattactcgtggactggagctaccaagtaccacctcaatggaagagactctctggtgaatccgggcccagctatggccagccacaaggacgatgaagaaaaatattttcctcagagcggggttctcatctttggaaaacaagactcgggaaaaactaatgtggacattgaaaaggttatgattacagacgaagaggaaatcaggaccaccaatcccgtggctacggagcagtatggttctgtatctaccaacctccagagcggcaacacacaagcagctacctcagatgtcaacacacaaggcgttcttccaggcatggtctggcaggacagagacgtgtacctgcaggggcccatctgggcaaagattccacacacggacggacattttcacccctctccccccatgggcggattcggacttaaacaccctcctccacaaattctcatcaagaacaccccggtacctgcgaatccttcgaccactttcagtgcggcaaagtttgcttccttcatcacacagtactccacggggcaggtcagcgtggagatcgagtgggagctgcagaaggagaacagcaaacgctggaatcccgaaattcagtacacttccaactacaacaaatctgttaatgtggactttactgtggacactaatggtgtgtattcagagcctcgccccattggcgccagatacctgactcgtaatctgtaa

SEQ ID NO: 235 - protein, 735 aa, Adeno-associated virus
MAADGYLPDWLEDTLSEGIRQWWKLKPGPPPPKPAERHKDDSRGLVLPGYRYLGPFNGLDKGEPVNEADAAALEHDKAYDRQLDSGDNPYLKYNHVDAEFQERLKEDTSFGGNLGRAVFQAKKRILEPLGLVEEPVKAAPGEKRPVEHSPAEPDSSSGTGKAGQQPARKRLNFGQTGDADSVPDPQPLGQPPAAPSGLGTNTMASGSGAPMADNNEGADGVGNSSGNWHCDSTWMGDRVITTSTRTWALPTYNNHLYKQISSQSGASNDNHYFGYSTPWGHFDFNRFHCHFSPRDWQRLINNNWGFRPKRLSFKLFNIQVKEVTQNDGTTTIANNLTSTVQVFTDSEYQLPYVLGSAHQGCLPPFPADVFMVPQYGYLTLNNGSQAVGRSSFYCLEYFPSQMLRTGNNFTFSYTFEDVPFHSSYAHSQSLDRLMNPLIDQYLYYLSRTNTPSGTTTMSRLQFSQAGASDIRDQSRNWLPGPCYRQQRVSKTAADNNNSDYSWTGATKYHLNGRDSLVNPGPAMASHKDDEEKYFPQSGVLIFGKQDSGKTNVDIEKVMITDEEEIRTTNPVATEQYGSVSTNLQSGNTQAATSDVNTQGVLPGMVWQDRDVYLQGPIWAKIPHTDGHFHPSPPMGGFGLKHPPPQILIKNTPVPANPSTTFSAAKFASFITQYSTGQVSVEIEWELQKENSKRWNPEIQYTSNYNKSVNVDFTVDTNGVYSEPRPIGARYLTRNL

SEQ ID NO: 236 - DNA, 2208 bp, Adeno-associated virus
atggctgccgatggttatcttccagattggctcgaggacaccctctctgaaggaataagacagtggtggaagctcaaacctggcccaccaccaccaaagcccgcagagcggcataaggacgacagcaggggtcttgtgcttcctgggtacaagtacctcggacccttcaacggactcgacaagggagagccggtcaacgaggcagacgccgcggccctcgagcacgacaaggcctacgaccggcagctcgacagcggagataacccgtacctcaagtacaaccacgccgacgcggagtttcaggagcgccttaaagaggatacgtcttttgggggcaacctcggacgagcagtcttccaggccaaaaagaggattcttgaacctctgggcctggttgaggaacctgttaagacggctccgggaaaaaagaggccggtagagcactctcctgcggagccagactcctcctcgggaaccggaaaagcgggccagcagcctgcaagaaagagattgaattttggtcagactggagacgcagactcagtacctgacccccggcctctcggacagccaccagcagccccctctggtctgggaactaatacgatggcttcaggcagtggcgcaccaatggcagacaataacgagggcgccgacggagtgggtaattcctcgggaaattggcattgcgattccacatggatgggcgacagagtcatcaccaccagcacccgcacctgggccctgcccacctacaacaaccatctgtacaagcaaatctccagccagtctggagccagcaacgacaaccactactttggctacagcaccccctgggggtattttgacttcaacagattccactgccacttctccccacgtgactggcaaagactcatcaacaacaactggggattccggcccaagagactcagcttcaagctctttaacattcaagtcaaagaggtcacgcagaatgacggtacgacgacgattgccaataaccttaccagcacggttcaggtgtttactgactcggagtaccagctcccgtacgtcctcggctcggcgcatcaaggatgcctcccgccgttcccagcagacgtcttcatggtgccacagtatggatacctcaccctgaacaacggcagtcaggcggtaggacgctcttccttttactgcctggagtactttccttctcagatgcttcgtaccggaaacaactttaccttcagctacacctttgaagacgttcctttccatagcagctacgctcacagccaaagtctggaccgtctcatgaatcctctcatcgaccagtacctgtattacttgagcagaacaaacactccaagcggaaccaccacgatgtccaggcttcagttttctcaggccggagcaagtgacattcgggaccagtctagaaactggcttcctggaccctgttaccgccagcagcgagtatcaaagacagctgcggacaacaacaacagtgattactcgtggactggagctaccaagtaccacctcaatggaagagactctctggtgaatccgggcccagctatggccagccacaaggacgatgaagaaaaatattttcctcagagcggggttctcatctttggaaaacaagactcgggaaaaactaatgtggacattgaaaaggttatgattacagacgaagaggaaatcaggaccaccaatcccgtggctacggagcagtatggttctgtatctaccaacctccagagcggcaacacacaagcagctacctcagatgtcaacacacaaggcgttcttccaggcatggtctggcaggacagagacgtgtacctgcaggggcccatctgggcaaagattccacacacggacggacattttcacccctctcccctcatgggcggattcggacttaaacaccctcctccacaaattctcatcaagaacaccccggtacctgcgaatccttcgaccactttcagtgcggcaaagtttgcttccttcatcacacagtactccacggggcaggtcagcgtggagatcgagtgggagctgcagaaggagaacagcaaacgctggaatcccgaaattcagtacacttccaactacaacaaatctgttaatgtggactttactgtggacactaatggtgtgtattcagagcctcgccccattggcaccagatacctgactcgtaatctgtaa

SEQ ID NO: 237 - protein, 735 aa, Adeno-associated virus
MAADGYLPDWLEDTLSEGIRQWWKLKPGPPPPKPAERHKDDSRGLVLPGYKYLGPFNGLDKGEPVNEADAAALEHDKAYDRQLDSGDNPYLKYNHADAEFQERLKEDTSFGGNLGRAVFQAKKRILEPLGLVEEPVKTAPGKKRPVEHSPAEPDSSSGTGKAGQQPARKRLNFGQTGDADSVPDPRPLGQPPAAPSGLGTNTMASGSGAPMADNNEGADGVGNSSGNWHCDSTWMGDRVITTSTRTWALPTYNNHLYKQISSQSGASNDNHYFGYSTPWGYFDFNRFHCHFSPRDWQRLINNNWGFRPKRLSFKLFNIQVKEVTQNDGTTTIANNLTSTVQVFTDSEYQLPYVLGSAHQGCLPPFPADVFMVPQYGYLTLNNGSQAVGRSSFYCLEYFPSQMLRTGNNFTFSYTFEDVPFHSSYAHSQSLDRLMNPLIDQYLYYLSRTNTPSGTTTMSRLQFSQAGASDIRDQSRNWLPGPCYRQQRVSKTAADNNNSDYSWTGATKYHLNGRDSLVNPGPAMASHKDDEEKYFPQSGVLIFGKQDSGKTNVDIEKVMITDEEEIRTTNPVATEQYGSVSTNLQSGNTQAATSDVNTQGVLPGMVWQDRDVYLQGPIWAKIPHTDGHFHPSPLMGGFGLKHPPPQILIKNTPVPANPSTTFSAAKFASFITQYSTGQVSVEIEWELQKENSKRWNPEIQYTSNYNKSVNVDFTVDTNGVYSEPRPIGTRYLTRNL

SEQ ID NO: 238 - DNA, 2208 bp, Adeno-associated virus
atggctgccgatggttatcttccagattggctcgaggacactctctctgaaggaataagacagtggtggaagctcaaacctggcccaccaccaccaaagcccgcagagcggcataaggacgacagcaggggtcttgtgcttcctgggtacaagtacctcggacccttcaacggactcgacaagggagagccggtcaacgaggcagacgccgcggccctcgagcacgacaaggcctacgaccggcagctcgacagcggagacaacccgtacctcaagtacaaccacgccgacgcggagtttcaggagcgccttaaaggagatacgtcttttgggggcaacctcggacgagcagtcttccaggccaaaaagaggattcttgaacctctgggcctggttgaggaacctgttaagacggctccgggaaaaaagaggccggtagagcactctcctgcggagccagactcctcctcgggaaccggaaaagcgggccagcagcctgcaagaaagagattgaattttggtcagactggagacgcagactcagtacctgacccccagcctctcggacagccaccagcagccccctctggtctgggaactaatacgatggcttcaggcagtggcgcaccaatggcagacaataacgagggcgccgacggagtgggtaattcctcgggaaattggcattgcgattccacatggatgggcggcagagtcatcaccaccagcacccgcacctgggccctgcccacctacaacaaccatctgtacaagcaaatctccagccagtctggagccagcaacgacaaccactactttggctacagcaccccctgggggtattttgacttcaacagattccactgccacttctccccacgtgactggcaaagactcatcaacaacaactggggattccggcccaagagactcagcttcaagctctttaacattcaagtcaaagaggtcacgcagaatgacggtacgacgacgattgccaataaccttaccagcacggttcaggtgtttactgactcggagtaccagctcccgtacgtcctcggctcggcgcatcaaggatgcctcccgccgttcccagcagacgtcttcatggtgccacagtatggatacctcaccctgaacaacggcagtcaggcggtaggacgctcttccttttactgcctggagtactttccttctcagacgcttcgtaccggaaacaactttaccttcagctacacctttgaagacgttcctttccatagcagctacgctcacagccaaagtctggaccgtctcatgaatcctctcatcgaccagtacctgtattacttgagcagaacaaacactccaagcggaaccaccacgatgtccaggcttcagttttctcaggccggagcaagtgacattcgggaccagtctagaaactggcttcctggaccctgttaccgccagcagcgagtatcaaagacagctgcggacaacaacaacagtgattactcgtggactggagctaccaagtaccacctcaatggaagagactctctggtgaatccgggcccagctatggccagccacaaggacgatgaagaaaaatattttcctcagagcggggttctcatctttggaaaacaagactcgggaaaaactaatgtggacattgaaaaggttatgattacagacgaagaggaaatcaggaccaccaatcccgtggctacggagcagtatggttctgtatctaccaacctccagagcggcaacacacaagcagctacctcagatgtcaacacacaaggcgttcttccaggcatggtctggcaggacagagacgtgtacctgcaggggcccatctgggcaaagattccacacacggacggacattttcacccctctcccctcatgggcggattcggacttaaacaccctcctccacaaattctcatcaagaacaccccggtacctgcgaatccttcgaccactttcagtgcggcaaagtttgcttccttcatcacacagtactccacggggcaggtcagcgtggagatcgagtgggagctgcagaaggagaacagcaaacgctggaatcccgaaattcagtacacttccaactacaacaaatctgttaatgtggactttactgtggacactaatggtgtgtattcagagcctcgccccattggcaccagatacctgactcgtaatctgtaa

SEQ ID NO: 239 - protein, 735 aa, Adeno-associated virus
MAADGYLPDWLEDTLSEGIRQWWKLKPGPPPPKPAERHKDDSRGLVLPGYKYLGPFNGLDKGEPVNEADAAALEHDKAYDRQLDSGDNPYLKYNHADAEFQERLKGDTSFGGNLGRAVFQAKKRILEPLGLVEEPVKTAPGKKRPVEHSPAEPDSSSGTGKAGQQPARKRLNFGQTGDADSVPDPQPLGQPPAAPSGLGTNTMASGSGAPMADNNEGADGVGNSSGNWHCDSTWMGGRVITTSTRTWALPTYNNHLYKQISSQSGASNDNHYFGYSTPWGYFDFNRFHCHFSPRDWQRLINNNWGFRPKRLSFKLFNIQVKEVTQNDGTTTIANNLTSTVQVFTDSEYQLPYVLGSAHQGCLPPFPADVFMVPQYGYLTLNNGSQAVGRSSFYCLEYFPSQTLRTGNNFTFSYTFEDVPFHSSYAHSQSLDRLMNPLIDQYLYYLSRTNTPSGTTTMSRLQFSQAGASDIRDQSRNWLPGPCYRQQRVSKTAADNNNSDYSWTGATKYHLNGRDSLVNPGPAMASHKDDEEKYFPQSGVLIFGKQDSGKTNVDIEKVMITDEEEIRTTNPVATEQYGSVSTNLQSGNTQAATSDVNTQGVLPGMVWQDRDVYLQGPIWAKIPHTDGHFHPSPLMGGFGLKHPPPQILIKNTPVPANPSTTFSAAKFASFITQYSTGQVSVEIEWELQKENSKRWNPEIQYTSNYNKSVNVDFTVDTNGVYSEPRPIGTRYLTRNL

SEQ ID NO: 240 - DNA, 2208 bp, Adeno-associated virus
atggctgccgatggttatcttccagattggctcgaggacactctctctgaaggaataagacagtggtggaagctcaaacctggcccaccaccaccaaagcccgcagagcggcataaggacgacagcaggggtcttgtgcttcctgggtacaagtacctcggacccttcaacggactcgacaagggagagccggtcaacgaggcagacgccgcggccctcgagcacgacaaggcctacgaccggcagctcgacagcggagacaacccgtacctcaagtacaaccacgccgacgcggagtttcaggagcgtcttaaagaagatacgtcttttgggggcaacctcggacgagcagtcttccaggccaaaaagaggattcttgaacctctgggcctggttgaggaacctgttaagacggctccgggaaaaaagaggccggtagagcactctcctgcggagccagactcctcctcgggaaccggaaaagcgggccagcagcctgcaagaaagagattgaattttggtcagactggagacgcagactcagtacctgacccccagcctctcggacagccaccagcagccccctctggtctgggaactaatacgatggcttcaggcagtggcgcaccaatggcagacaataacgagggcgccgacggagtgggtaattcctcgggaaattggcattgcgattccacatggatgggcgacagagtcatcaccaccagcacccgcacctgggccctgcccacctgcaacaaccatctgtacaagcaaatctccagccagtctggagccagcaacgacaaccactactttggctacagcaccccctgggggtattttgacttcaacagattccactgccacttctccccacgtgactggcaaagactcatcaacaacaactggggattccggcccaagagactcagcttcaagctctttaacattcaagtcaaagaggtcacgcagaatgacggtacgacgacgattgccaataaccttaccagcacggttcaggtgtttactgactcggagtaccagctcccgtacgtcctcggctcggcgcatcaaggatgcctcccgccgttcccagcagacgtcttcatggtgccacagtatggatacctcaccctgaacaacggcagtcaggcggtaggacgctcttccttttactgcctggagtattttccttctcagatgcttcgtaccggaaacaactttaccttcagctacacctttgaagacgttcctttccatagcagctacgctcacagccaaagtctggaccgtctcatgaatcctctcatcgaccagtacctgtattacttgagcagaacaaacactccaagcggaaccaccacgatgtccaggcttcagttttctcaggccggagcaagtgacattcgggaccagtctagaaactggcttcctggaccctgttaccgccagcagcgagtatcaaagacagctgcggacaacaacaacagtgattactcgtggactggagctaccaagtaccacctcaatggaagagactctctggtgaatccgggcccagctatggccagccacaaggacgatgaagaaaaatattttcctcagagcggggttctcatctttggaaaacaagactcgggaaaaactaatgtggacattgaaaaggttatgattacagacgaagaggaaatcaggaccaccaatcccgtggctacggagcagtatggttctgtatctacctacctccagagcggcaacacacaagcagctacctcagatgtcaacacacaaggcgttcttccaggcatggtctggcaggacagagacgtgtacctgcgggggcccatctgggcaaagattccacacacggacggacattttcacccctctcccctcatgggcggatttggacttaaacaccctcctccacaaattctcatcaagaacaccccggtacctgcgaatccttcgaccactttcagtgcggcaaagtttgcttccttcatcacacagtactccacggggcaggtcagcgtggagatcgagtgggagctgcagaaggagaacagcaaacgctggaatcccgaaattcagtacacttccaactacaacaaatctgttaatgtggactttactgtggacactaatggtgtgtattcagagcctcgccccattggcaccagatacctgactcgtaatctgtaa

SEQ ID NO: 241 - protein, 735 aa, Adeno-associated virus
MAADGYLPDWLEDTLSEGIRQWWKLKPGPPPPKPAERHKDDSRGLVLPGYKYLGPFNGLDKGEPVNEADAAALEHDKAYDRQLDSGDNPYLKYNHADAEFQERLKEDTSFGGNLGRAVFQAKKRILEPLGLVEEPVKTAPGKKRPVEHSPAEPDSSSGTGKAGQQPARKRLNFGQTGDADSVPDPQPLGQPPAAPSGLGTNTMASGSGAPMADNNEGADGVGNSSGNWHCDSTWMGDRVITTSTRTWALPTCNNHLYKQISSQSGASNDNHYFGYSTPWGYFDFNRFHCHFSPRDWQRLINNNWGFRPKRLSFKLFNIQVKEVTQNDGTTTIANNLTSTVQVFTDSEYQLPYVLGSAHQGCLPPFPADVFMVPQYGYLTLNNGSQAVGRSSFYCLEYFPSQMLRTGNNFTFSYTFEDVPFHSSYAHSQSLDRLMNPLIDQYLYYLSRTNTPSGTTTMSRLQFSQAGASDIRDQSRNWLPGPCYRQQRVSKTAADNNNSDYSWTGATKYHLNGRDSLVNPGPAMASHKDDEEKYFPQSGVLIFGKQDSGKTNVDIEKVMITDEEEIRTTNPVATEQYGSVSTYLQSGNTQAATSDVNTQGVLPGMVWQDRDVYLRGPIWAKIPHTDGHFHPSPLMGGFGLKHPPPQILIKNTPVPANPSTTFSAAKFASFITQYSTGQVSVEIEWELQKENSKRWNPEIQYTSNYNKSVNVDFTVDTNGVYSEPRPIGTRYLTRNL

SEQ ID NO: 242 - DNA, 2208 bp, Adeno-associated virus; identical to SEQ ID NO: 236

SEQ ID NO: 243 - protein, 735 aa, Adeno-associated virus; identical to SEQ ID NO: 237

SEQ ID NO: 244 - DNA, 2208 bp, Adeno-associated virus
atggctgccgatggttatcttccagattggctcgaggacactctctctgaaggaataagacagtggtggaagctcaaacctggcccaccaccaccaaagcccgcagagcggcataaggacggcagcaggggtcttgtgcttcctgggtacaagtacctcggacccttcaacggactcgacaagggagagccggtcaacgaggcagacgccgcggccctcgagcacgacaaggcctacgaccggcagctcaacagcggagacaacccgtacctcaagtacaaccacgccgacgcggagtttcaggagcgccttaaagaagatacgtcttttgggggcaacctcggacgagcagtcttccaggcaaaaaagagggttcttgaacctctgggcctggttgaggagcctgttaaaacggctccgggaaaaaagagaccggtagagcactctcctgcggagccagactcctcctcgggaaccggaaaagcgggccagcagcctgcaagaaagagattgaattttggtcagactggagacgcagactccgtacctgacccccagcctctcggacagccaccagcagccccctctggtctgggatctactacaatggctacaggcagtggcgcaccaatggcagacaataacgagggtgccgatggagtgggtaattcctcaggaaattggcattgcgattcccaatggctgggcgacagagtcatcaccacaagcactcgaacctgggccctgcccacctacaacaaccacctctacaagcaaatctccagccaatcaggagcctcaaacgacaaccactattttggctacagcaccccttgggggtattttgacttcaacagattccactgccacttttcaccacgtgactggcaaagactcatcaacaacaactggggattccgacccaagagactcaacttcaagctctttaacattcaagtcaaagaggtcacgcagaatgacggtacgacgacgattgccaataaccttaccagcacggttcaggtgtttactgactcggagtaccagctcccgtacgtcctcggctcggcgcatcaaggatgcctcccgccgttcccagcggacgtcttcatggtcccacagtatggatacctcaccctgaacaacgggagtcaggcggtaggacgctctcccttttactgcctggagtactttccttctcagatgctgcgtactggaaacaactttcagttcagctacacttttgaagacgtgcctttccacagcagctacgctcacagccagagtctggatcggctgatgaatcctctgatcgaccagtacctgtattatctgaacaagacacaaacaaatagtggaactcttcagcagtctcggctactgtttagccaagctggacccaccaacatgtctcttcaagctaaaaactggctgcctggaccttgctacagacagcagcgtctgtcaaagcaggcaaacgacaacaacaacagcaactttccctggactgcagctacaaagtatcatctaaatggccgggactcgttggttaatccaggaccagctatggccagtcacaaggatgacgaagaaaagtttttccccatgcatggaaccctgatatttggtaaacaaggaacaaatgccaacgacgcggatttggaaaatgtcatgattacagatgaagaagaaatcaggaccaccaatcccgtggctacggagcagtacgggactgtgtcaaataatttgcaaaactcaaacactggtccaactactggaactgtcaatcaccaaggagcgttacctggtatggtgtggcaggatcgagatgtgtaccttcagggacccatttgggccaagattcctcacaccgatggacactttcatccttctccactgatgggaggttttggactcaaacacccgcctcctcagattatgatcaaaaacactcccgttccagccaatcctcctacaaacttcagttctgccaagtttgcttctttcatcacacagtattccacggggcaggtcagcgtggagatcgagtgggagctgcagaaggagaacagcaaacgctggaatcccgaaattcagtacacttccaactacaacaaatctgttaatgtggactttactgtggacaataatggcgtgtactcagagcctcgccccattggcaccagatacctgactcgtaatctgtaa

SEQ ID NO: 245 - protein, 735 aa, Adeno-associated virus
MAADGYLPDWLEDTLSEGIRQWWKLKPGPPPPKPAERHKDGSRGLVLPGYKYLGPFNGLDKGEPVNEADAAALEHDKAYDRQLNSGDNPYLKYNHADAEFQERLKEDTSFGGNLGRAVFQAKKRVLEPLGLVEEPVKTAPGKKRPVEHSPAEPDSSSGTGKAGQQPARKRLNFGQTGDADSVPDPQPLGQPPAAPSGLGSTTMATGSGAPMADNNEGADGVGNSSGNWHCDSQWLGDRVITTSTRTWALPTYNNHLYKQISSQSGASNDNHYFGYSTPWGYFDFNRFHCHFSPRDWQRLINNNWGFRPKRLNFKLFNIQVKEVTQNDGTTTIANNLTSTVQVFTDSEYQLPYVLGSAHQGCLPPFPADVFMVPQYGYLTLNNGSQAVGRSPFYCLEYFPSQMLRTGNNFQFSYTFEDVPFHSSYAHSQSLDRLMNPLIDQYLYYLNKTQTNSGTLQQSRLLFSQAGPTNMSLQAKNWLPGPCYRQQRLSKQANDNNNSNFPWTAATKYHLNGRDSLVNPGPAMASHKDDEEKFFPMHGTLIFGKQGTNANDADLENVMITDEEEIRTTNPVATEQYGTVSNNLQNSNTGPTTGTVNHQGALPGMVWQDRDVYLQGPIWAKIPHTDGHFHPSPLMGGFGLKHPPPQIMIKNTPVPANPPTNFSSAKFASFITQYSTGQVSVEIEWELQKENSKRWNPEIQYTSNYNKSVNVDFTVDNNGVYSEPRPIGTRYLTRNL

SEQ ID NO: 246 - DNA, 2208 bp, Adeno-associated virus
atggctgccgatggttatcttccagattggctcgaggacactctctctgaaggaataagacagtggtggaagctcaaacctggcccaccaccaccaaagcccgcagagcggcataaggacgacagcaggggtcttgtgcttcctgggtacaagtacctcggacccttcaacggactcgacaagggagagccggtcaacgaggcagacgccgcggccctcgagcacgacaaggcctacgaccggcagctcgacagcggagacaacccgtacctcaagtacaaccacgccgacgcggagtttcaggagcgtcttaaagaagatacgtcttttgggggcaacctcggacgagcagtcttccaggccaaaaagaggattcttgaacctctgggcctggttgaggaacctgttaagacggctccgggaaaaaagaggccggtagagcactctcctgcggagccagactcctcctcgggaaccggaaaagcgggccagcagcctgcaagaaagagattgaattttggtcagactggagacgcagactcagtacctgacccccagcctctcggacagccaccagcagccccctctggtctgggaactaatacgatggcttcaggcagtggcgcaccaatggcagacaataacgagggcgccgacggagtgggtaattcctcgggaaattggcattgcgattccacatggatgggcgacagagtcatcaccaccagcacccgcacctgggccctgcccacctacaacaaccatctgtacaagcaaatctccagccagtctggagccagcaacgacaaccactactttggctacagcaccccctgggggtattttgacttcaacagattccactgccacttctccccacgtgactggcaaagactcatcaacaacaactggggattccggcccaagagactcagcttcaagctctttaacattcaagtcaaagaggtcacgcagaatgacggtacgacgacgattgccaataaccttaccagcacggttcaggtgtttactgactcggagtaccagctcccgtacgtcctcggctcggcgcatcaaggatgcctcccgccgttcccagcagacgtcttcatggtgccacagtatggatacctcaccctgaacaacggcagtcaggcggtaggacgctcttccttttactgcctggagtactttccttctcagatgcttcgtaccggaaacaactttaccttcagctacacctttgaagacgttcctttccatagcagctacgctcacagccaaagtctggaccgtctcatgaatcctctcatcgaccagtacctgtattacttgagcagaacaaacactccaagcggaaccaccacgatgtccaggcttcagttttctcaggccggagcaagtgacattcgggaccagtctagaaactggcttcctggaccctgttaccgccagcagcgagtatcaaagacagctgcggacaacaacaacagtgattactcgtggactggagctaccaagtaccacctcaatggaagagactctctggtgaatccgggcccagctatggccagccacaaggacgatgaagaaaaatattttcctcagagcggggttctcatctttggaaaacaagactcgggaaaaactaatgtggacattgaaaaggttatgattacagacgaagaggaaatcaggaccaccaatcccgtggctacggagcagtatggttctgtatctaccaacctccagagcggcaacacacaagcagctacctcagatgtcaacacacaaggcgttcttccaggcatggtctggcaggacagagacgtgtacctgcaggggcccatctgggcaaagattccacacacggacggacattttcacccctctcccctcatgggcggattcggacttaaacaccctcctccacaaattctcatcaagaacaccccggtacctgcgaatccttcgaccactttcagtgcggcaaagtttgcttccttcatcacacagtactccacggggcaggtcagcgtggagatcgagtgggagctgcagaaggagaacagcaaacgctggaatcccgaaattcagtacacttccaactacaacaaatctgttaatgtggactttactgtggacactaatggtgtgtattcagagcctcgccccattggcaccagatacctgactcgtaatctgtaa

SEQ ID NO: 247 - protein, 735 aa, Adeno-associated virus
MAADGYLPDWLEDTLSEGIRQWWKLKPGPPPPKPAERHKDDSRGLVLPGYKYLGPFNGLDKGEPVNEADAAALEHDKAYDRQLDSGDNPYLKYNHADAEFQERLKEDTSFGGNLGRAVFQAKKRILEPLGLVEEPVKTAPGKKRPVEHSPAEPDSSSGTGKAGQQPARKRLNFGQTGDADSVPDPQPLGQPPAAPSGLGTNTMASGSGAPMADNNEGADGVGNSSGNWHCDSTWMGDRVITTSTRTWALPTYNNHLYKQISSQSGASNDNHYFGYSTPWGYFDFNRFHCHFSPRDWQRLINNNWGFRPKRLSFKLFNIQVKEVTQNDGTTTIANNLTSTVQVFTDSEYQLPYVLGSAHQGCLPPFPADVFMVPQYGYLTLNNGSQAVGRSSFYCLEYFPSQMLRTGNNFTFSYTFEDVPFHSSYAHSQSLDRLMNPLIDQYLYYLSRTNTPSGTTTMSRLQFSQAGASDIRDQSRNWLPGPCYRQQRVSKTAADNNNSDYSWTGATKYHLNGRDSLVNPGPAMASHKDDEEKYFPQSGVLIFGKQDSGKTNVDIEKVMITDEEEIRTTNPVATEQYGSVSTNLQSGNTQAATSDVNTQGVLPGMVWQDRDVYLQGPIWAKIPHTDGHFHPSPLMGGFGLKHPPPQILIKNTPVPANPSTTFSAAKFASFITQYSTGQVSVEIEWELQKENSKRWNPEIQYTSNYNKSVNVDFTVDTNGVYSEPRPIGTRYLTRNL

SEQ ID NO: 248 - DNA, 2208 bp, Adeno-associated virus
atggctgccgatggttatcttccagattggctcgaggacactctctctgaaggaataagacagtggtggaagctcaaacctggcccaccaccaccaaagcccgcagagcggcataaggacgacagcaggggtcttgtgcttcctgggtacaagtacctcggacccttcaacggactcgacaagggagagccggtcaacgaggcagacgccgcggccctcgagcacgacaaggcctacgaccggcagctcgacagcggagacaacccgtacctcaagtacaaccacgccgacgcggagtttcaggagcgtcttaaagaagatacgtcttttgggggcaacctcggacgagcagtcttccaggccaaaaagaggattcttgaacctctgggcctggttgaggaacctgttaagacggctccgggaaaaaagaggccggtagagcactctcctgcggagccagactcctcctcgggaaccggaaaagcgggccagcagcctgcaagaaagagattgaattttggtcagactggagacgcagactcagtacctgacccccagcctctcggacagccaccagcagccccctctggtctgggaactaatacgatggcttcaggcagtggcgcaccaatggcagacaataacgagggcgccgacggagtgggtaattcctcgggaaattggcattgcgattccacatggatgggcgacagagtcatcaccaccagcacccgcacctgggccctgcccacctacaacaaccatctgtacaagcaaatctccagccagtctggagccagcaacgacaaccactactttggctacagcaccccctgggggtatttcgacttcaacagattccactgccacttctccccacgtgactggcaaagactcatcaacaacaactggggattccggcccaagagactcagcttcaagctctttaacattcaagtcaaagaggtcacgcagaatgacggtacgacgacgattgccaataaccttaccagcacggttcaggtgtttactgactcggggtaccagctcccgtacgtcctcggctcggcgcatcaaggatgccttccgccgttcccagcagacgtcttcatggtgccacagtatggatacctcaccctgaacaacggcagtcaggcggtaggacgctcttccttttactgcctggagtactttccttctcagatgcttcgtaccggaaacaactttaccttcagctacacctttgaagacgttcctttccatagcagctacgctcacggccaaagtctggaccgtctcatgaatcctctcatcgaccagtacctgtattacttgagcagaacaaacactccaagcggaaccaccacgatgtccaggcttcagttttctcaggccggagcaagtgacgttcgggaccagtctagaaactggcttcctggaccctgttaccgccagcagcgagtatcaaagacagctgcggacaacaacaacagtgattactcgtggactggagctaccaagtaccacctcaatggaagagactctctggtgaatccgggcccagctatggccagccacaaggacgatgaagaaaaatattttcctcagagcggggttctcgtctttggaaaacaagactcgggaaaaactaatgtggacattgaaaaggttatgattacagacgaagaggaaatcaggaccaccaatcccgcggctacggagcagtatggttctgtatctaccaacctccagagcggcaacacacaagcagctacctcagatgtcaacacacaaggcgttcttccaggcatggtctggcaggacagagacgtgtacctgcaggggcccatctgggcaaagattccacacacggacggacattttcacccctctcccctcatgggcggattcggacttaaacaccctcctccacaaattctcatcaagaacaccccggtacctgcgaatccttcgaccactttcagtgcggcaaagtttgtttccttcatcacacagtactccacggggcaggtcagcgtggagatcgagtgggagctgcagaaggagaacagcaaacgctggaatcccgaaattcagtacacttccaactacaacaaatctgttaatgtggactttactgtggacactaatggtgtgtattcagagcctcgccccattggcaccagatacctgactcgtaatctgtaa

SEQ ID NO: 249 - protein, 735 aa, Adeno-associated virus
MAADGYLPDWLEDTLSEGIRQWWKLKPGPPPPKPAERHKDDSRGLVLPGYKYLGPFNGLDKGEPVNEADAAALEHDKAYDRQLDSGDNPYLKYNHADAEFQERLKEDTSFGGNLGRAVFQAKKRILEPLGLVEEPVKTAPGKKRPVEHSPAEPDSSSGTGKAGQQPARKRLNFGQTGDADSVPDPQPLGQPPAAPSGLGTNTMASGSGAPMADNNEGADGVGNSSGNWHCDSTWMGDRVITTSTRTWALPTYNNHLYKQISSQSGASNDNHYFGYSTPWGYFDFNRFHCHFSPRDWQRLINNNWGFRPKRLSFKLFNIQVKEVTQNDGTTTIANNLTSTVQVFTDSGYQLPYVLGSAHQGCLPPFPADVFMVPQYGYLTLNNGSQAVGRSSFYCLEYFPSQMLRTGNNFTFSYTFEDVPFHSSYAHGQSLDRLMNPLIDQYLYYLSRTNTPSGTTTMSRLQFSQAGASDVRDQSRNWLPGPCYRQQRVSKTAADNNNSDYSWTGATKYHLNGRDSLVNPGPAMASHKDDEEKYFPQSGVLVFGKQDSGKTNVDIEKVMITDEEEIRTTNPAATEQYGSVSTNLQSGNTQAATSDVNTQGVLPGMVWQDRDVYLQGPIWAKIPHTDGHFHPSPLMGGFGLKHPPPQILIKNTPVPANPSTTFSAAKFVSFITQYSTGQVSVEIEWELQKENSKRWNPEIQYTSNYNKSVNVDFTVDTNGVYSEPRPIGTRYLTRNL

SEQ ID NO: 250 - DNA, 2208 bp, Adeno-associated virus
atggctgccgatggttatcttccagattggctcgaggacactctctctgaaggaataagacagtggtggaaactcaaacctggcccaccaccaccaaagcccgcagagcggcataaggacgacagcaggggtcttgtgcttcctgggtacaagtacctcggacccttcaacggactcgacaagggagagccggtcaacgaggcagacgccgcggccctcgagcacgacaaggcctacgaccggcagctcgacagcggagacaacccgtacctcaagtacaaccacgccgacgcggagtttcaggagcgccttaaagaagatacgtcttttgggggcaacctcggacgagcagtcttccaggcaaaaaagagggttctggaacctctgagcctggttgaggagcctgttaagacggctccgggaaaaaagaggccggtagagcactctcccgcagagccagattcctcctccggaactggaaagtcgggcaaccagcctgcaagaaagagattgaatttcggtcagactggagactcagactccgtacctgacccccagcctctcggacagccaccagcagccccctctggtctgggaactaatacgatggctacaggcagtggcgcaccaatggcagacaataacgagggcgccgacggagtgggtaattcctcgggaaattggcattgcgattccacatggatgggcgacagagtcatcaccaccagcacccgaacctgggccctgcccacctacaacaaccatctgtacaagcaaatatccagccagtctggagccagcaacgacaatcactactttggctacagcaccccctgggggtattttgacttcaacagattccactgccacttttcaccacgtgactggcaaagactcatcaacaacaactggggattccgacccaagagactcaacttcaagctctttaacattcaagtcaaagaggtcacgcagaatgacggtacgacgacgattgccaataaccttaccagcacggttcaggtgtttactgactcggagtaccagctcccgtacgtcctcggctcggcgcatcaaggatgcctcccgccgttcccagcagacgtcttcatggtgccacagtatggatacctcaccctgaacaacgggagtcaggcagtaggacgctcttcattttactgcctagagtactttccttctcagatgctgcgtaccggaaacaactttaccttcagctacacctttgaggacgttcctttccacagcagctacgctcacagccagagtttggaccgtctcatgaatcctctcatcgaccagtacctgtattacttgagcagaacaaacactccaagcggaaccaccacgcagtccaggcttcagttttctcaggccggagcgagtgacattcaggaccagtctaggaactggcttcctggaccctgttaccgtcagcagcgagtatcaaagacatctgcggataacaacaacagtgaatactcgtggactggagctaccaagtaccacctcaatggcagagactctctggtgaatccgggcccggccatggccagccacaaagacgatgaagaaaagttttttcctcagagcggggttcttatctttgggaagcaaggctcagagaaaacaaatgtggatattgaaaaggtcatgattacagacgaagaggaaatcaggaccaccaatcccgtggctacggagcagtatggttctgtatctaccaacctccagagcggcaacacacaagcagctaccgcagatgtcaacacacaaggcgttcttccaggcatggtcgggcaagacagagacgtgtacctgcaggggcctacttgggcaaagattccacacacggacggacattttcacccctctcccctcatgggcggatttggacttaaacaccctcctccacagattctcatcaagaacaccccggtacctgcgaatccttcgaccaccttcagtgcggcaaagtttgcttccttcattacacagtactccacggggcaggtcagcgtggagatcgagtgggagctgcagaaggagaacagcaaacgctggaatcccgagatccagtacacttccaactacaacaagtctgttaatgtggactttactgtggacactaatggcgtgtattcagagcctcgccccattggcaccagatacctgactcgtaatctgtaa

SEQ ID NO: 251 - protein, 735 aa, Adeno-associated virus
MAADGYLPDWLEDTLSEGIRQWWKLKPGPPPPKPAERHKDDSRGLVLPGYKYLGPFNGLDKGEPVNEADAAALEHDKAYDRQLDSGDNPYLKYNHADAEFQERLKEDTSFGGNLGRAVFQAKKRVLEPLSLVEEPVKTAPGKKRPVEHSPAEPDSSSGTGKSGNQPARKRLNFGQTGDSDSVPDPQPLGQPPAAPSGLGTNTMATGSGAPMADNNEGADGVGNSSGNWHCDSTWMGDRVITTSTRTWALPTYNNHLYKQISSQSGASNDNHYFGYSTPWGYFDFNRFHCHFSPRDWQRLINNNWGFRPKRLNFKLFNIQVKEVTQNDGTTTIANNLTSTVQVFTDSEYQLPYVLGSAHQGCLPPFPADVFMVPQYGYLTLNNGSQAVGRSSFYCLEYFPSQMLRTGNNFTFSYTFEDVPFHSSYAHSQSLDRLMNPLIDQYLYYLSRTNTPSGTTTQSRLQFSQAGASDIQDQSRNWLPGPCYRQQRVSKTSADNNNSEYSWTGATKYHLNGRDSLVNPGPAMASHKDDEEKFFPQSGVLIFGKQGSEKTNVDIEKVMITDEEEIRTTNPVATEQYGSVSTNLQSGNTQAATADVNTQGVLPGMVGQDRDVYLQGPTWAKIPHTDGHFHPSPLMGGFGLKHPPPQILIKNTPVPANPSTTFSAAKFASFITQYSTGQVSVEIEWELQKENSKRWNPEIQYTSNYNKSVNVDFTVDTNGVYSEPRPIGTRYLTRNL

SEQ ID NO: 252 - DNA, 2208 bp, Adeno-associated virus
atggctgccgatggttatcttccagattggctcgaggacactctctctgaaggaataagacagtggtggaagctcaaacctggcccaccaccaccaaagcccgcagagcggcataaggacgacagcaggggtcttgtgcttcctgggtacaagtacctcggacccttcaacggactcgacaagggagagccggtcaacgaggcagacgccgcggccctcgagcacgacaaggcctacgaccggcagctcgacagcggagacaacccgtacctcaagtacaaccacgccgacgcagagtttcaggagcgccttaaagaagatacgtcttttgggggcaacctcggacgagcagtcttccaggcaaaaaagagggttctggaacctctgggcctggttgaggagcctgttaagacggctccgggaaaaaagaggccggtagagcactctcctgcagagccagattcctcctccggaactggaaagtcgggcaaccagcctgcaagaaagagattgaatttcggtcagactggagactcagactccgtacctgacccccagcctctcggacagccaccagcagccccctctggtctgggaactaatacgatggctacaggcagtggcgcaccaatggcagacaataacgagggcgccgacggagtgggtaattcctcgggaaattggcattgcgattccacatggatgggcgacagagtcatcaccaccagcacccgaacctgggccctgcccacctacaacaaccatctgtacaagcaaatatccagccagtctggagccagcaacgacaatcactactttggctacagcaccccctgggggtattttgacttcaacagattccactgccacttttcaccacgtgactggcaaagactcatcaacaacaactggggattccgacccaagagactcaacttcaagctctttaacattcaagtcaaagaggtcacgcagaatgacggtacgacgacgattgccaataaccttaccagcacggttcaggtgtttactgactcggagtaccagctcccgtacgtcctcggctcggcgcatcaaggatgcctcccgccgttcccagcagacgtcttcatggtgccacagtatggatacctcaccctgaacaacgggagtcaggcagtaggacgctcttcattttactgcctagggtactttccttctcagatgctgcgtaccggaaacaactttaccttcagctacacctttgaggacgttcctttccacagcagctacgctcacagccagagtttggaccgtctcatgaatcctctcatcgaccagtacctgtattacttgagcagaacaaacactccaagcggaaccaccacgcagtccaggcttcagttttctcaggccggagcgagtgacattcgggaccagtctaggaactggcttcctggaccctgttaccgtcagcagcgagtatcaaagacatctgcggataacaacaacagtgaatactcgtggactggagctaccaagtaccacctcaatggcagagactctctggtgaatccgggcccggccatggccagccacaaagacgatgaagaaaagttttttcctcagagcggggttcttatctttgggaagcaaggcccagagaaaacaaatgtggatattgaaaaggtcatgattacagacgaagaggaaatcaggaccaccaatcccgtggctacggagcagtatggttctgtatctaccaacctccagagcggcaacacacaagcagctaccgcagatgtcaacacacaaggcgttcttccaggcatggtctggcaagacagagacgtgtacctgcaggggcctatttgggcaaagattccacacacggacggacattttcacccctctcccctcatgggcggatttggacttaaacaccctcctccacagattctcatcaagaacaccccggtacctgcgaatccttcgaccaccttcagtgcggcaaagtttgcttccttcattacacagtactccacggggcaggtcagcgtggagatcgagtgggagctgcagaaggagaacagcaaacgctggaatcccgagatccagtacacttccaactacaacaagtctgttaatgtggactttactgtggacactaatggcgtgtattcagagcctcgccccattggcaccagatacctgactcgtaatctgtaa

SEQ ID NO: 253 - protein, 735 aa, Adeno-associated virus
MAADGYLPDWLEDTLSEGIRQWWKLKPGPPPPKPAERHKDDSRGLVLPGYKYLGPFNGLDKGEPVNEADAAALEHDKAYDRQLDSGDNPYLKYNHADAEFQERLKEDTSFGGNLGRAVFQAKKRVLEPLGLVEEPVKTAPGKKRPVEHSPAEPDSSSGTGKSGNQPARKRLNFGQTGDSDSVPDPQPLGQPPAAPSGLGTNTMATGSGAPMADNNEGADGVGNSSGNWHCDSTWMGDRVITTSTRTWALPTYNNHLYKQISSQSGASNDNHYFGYSTPWGYFDFNRFHCHFSPRDWQRLINNNWGFRPKRLNFKLFNIQVKEVTQNDGTTTIANNLTSTVQVFTDSEYQLPYVLGSAHQGCLPPFPADVFMVPQYGYLTLNNGSQAVGRSSFYCLGYFPSQMLRTGNNFTFSYTFEDVPFHSSYAHSQSLDRLMNPLIDQYLYYLSRTNTPSGTTTQSRLQFSQAGASDIRDQSRNWLPGPCYRQQRVSKTSADNNNSEYSWTGATKYHLNGRDSLVNPGPAMASHKDDEEKFFPQSGVLIFGKQGPEKTNVDIEKVMITDEEEIRTTNPVATEQYGSVSTNLQSGNTQAATADVNTQGVLPGMVWQDRDVYLQGPIWAKIPHTDGHFHPSPLMGGFGLKHPPPQILIKNTPVPANPSTTFSAAKFASFITQYSTGQVSVEIEWELQKENSKRWNPEIQYTSNYNKSVNVDFTVDTNGVYSEPRPIGTRYLTRNL

SEQ ID NO: 254 - protein, 735 aa, Adeno-associated virus
MAADGYLPDWLEDTLSEGIRQWWKLKPGPPPPKPAERHKDDSRGLVLPGYKYLGPFNGLDKGEPVNEADAAALEHDKAYDRQLDSGDNPYLKYNHADAEFQERLKEDTSFGGNLGRAVFQAKKRVLEPLGLVEEPVKTAPGKKRPVEHSPAEPDSSSGTGKSGNQPARKRLNFGQTGDSDSVPDPQPLGQPPAAPSGLGTNTMATGSGAPMADNNEGADGVGNSSGNWHCDSTWMGDRVITTSTRTWALPTYNNHLYKQISSQSGASNDNHYFGYSTPWGYFDFNRFHCHFSPRDWQRLINNNWGFRPKRLNFKLFNIQVKEVTQNDGTTTIANNLTSTVQVFTDSEYQLPYVLGSAHQGCLPPFPADVFMVPQYGYLTLNNGSQAVGRSSFYCLEYFPSQMLRTGNNFTFSYTFEDVPFHSSYAHSQSLDRLMNPLIDQYLYYLSRTNTPSGTTTQSRLQFSQAGASDIRDQSRNWLPGPCYRQQRVSKTSADNNNSEYSWTGATKYHLNGRDSLVNPGPAMASHKDDEEKFFPQSGVLIFGKQGPEKTNVDIEKVMITDEEEIRTTNPVATEQYGSVSTNLQSGNTQAATADVNTQGVLPGMVWQDRDVYLQGPIWAKIPHTDGHFHPSPLMGGFGLKHPPPQILIKNTPVPANPSTTFSAAKFASFITQYSTGQVSVEIEWELQKENSKRWNPEIQYTSNYNKSVNVDFTVDTNGVYSEPRPIGTRYLTRNL

SEQ ID NO: 255 - protein, 735 aa, Adeno-associated virus; identical to SEQ ID NO: 254

SEQ ID NO: 256 - DNA, 2211 bp, Adeno-associated virus
atggctgccgatggttatcttccagattggctcgaggacactctctctgaaggaataagacagtggtggaagctcaaacctggcccaccaccaccaaagcccgcagagcggcataaggacgacagcaggggtcttgtgcttcctgggtacaagtacctcggacccttcaacggactcgacaagggggagccggtcaacgaggcagacgccgcggccctcgagcacgacaaggcctacgaccggcagctcgacagcggagacaacccgtacctcaagtacaaccacgccgacgcagagtttcaggagcgccttaaagaagatacgtcttttgggggcaacctcggacgagcagtcttccaggcgaaaaagagggttcttgaacctctgcggcctggtttgaggaaacctgttaagacggctccgggaaaaaagaggccggtagagcactctcctgtggagccagactcctcctcgggaaccggaaaagcgggccagcagcctgcaagaaaaagattaaattttggtcagactggagacgcagactccgtacctgacccccagcctctcggacagccaccagcagccccctctggtctgggatctactacaatggctacaggcagtggcgcaccaatggcagacaataacgagggtgccgatggagtgggtaattcctcaggaaattggcattgcgattcccaatggctggacgacagagtcatcgccaccagcacccgaacctgggccctgcccacatacaacaaccacctctacaagcaaatctccagccaatcaggagcctgcaacgacaaccactactttggctacagcaccccctgggggtattttgacttcaacagattccactgccacttttcaccacgtgactggcaaagactcatcaacagcaactggggattccggcccaaaagactcaacttcaagctctttaatattcaagtcaaagaggtcacgcagaatgacggtacgacgacgattgccaataaccttaccagcacggttcaggtgtttactgactcggagtaccagctcccgtacgtcccgggctcggcgcatcaaggatgcctcccgccgtttccagcggacgtcttcatggtcccacagtatggatacctcaccctgaacaacgggagtcaggcggtaggacgctcttccttttactgcctggagtactttccttctcagatgctgcgtactggaaacaactttcagttcagctacacttttgaagacgtgcctttccacagcagctacgctcactgccagagtctggatcggctgatgaatcctctgatcgaccagtacctgtattatctgaacaagacacaaacaaatagtggaactcttcagcagtctcggctactgtttagccaagctggaccaaccaacatgtctcttcaagctaaaaactggctgcctggaccttgctacagacagcagcgtctgtcaaaacaggcaaacgacaataacaactgcaactttccctggactgcagctacaaagtatcatctaaatggccgggactcgttggttaatccaggaccagctatggccagtcacaaggatgacgaagaaaagtttttccccatgcatggaaccctgatatttggtaaacaaggaacaaatgccaacgacgcggatttggaaaatgtcatgattacagatgaagaagaaatcaggcccaccaatcccgtggctacggagcagtacgggactgtgtcaaataatttgcaaaactcaaacactggtccaactacaggaactgtcaatcaccaaggagcgttacctggtatggtgtggcaggatcgagacgtgtacctgcagggacccatttgggccaagattcctcacaccgatggacactttcatccttctccactgatgggaggttttggactcaaacacccgcctcctcagatcatgatcaaaagcactcccgttccagccaatcctcccacaaacttcagttctgccaagtttgcttcttccatcacacagtattccacgggacaggtcagcgtggagatcgagtgggagctgcagaaggagaacagcaaacgctggaatcccgaaattcagtacacttccaactacaacaagtctgttaatgtggactttactgtggacactaatggtgtgtattcagagcctcgccccattggcaccagatacctgactcgtaatctgtaa

SEQ ID NO: 257 - protein, 736 aa, Adeno-associated virus
MAADGYLPDWLEDTLSEGIRQWWKLKPGPPPPKPAERHKDDSRGLVLPGYKYLGPFNGLDKGEPVNEADAAALEHDKAYDRQLDSGDNPYLKYNHADAEFQERLKEDTSFGGNLGRAVFQAKKRVLEPLRPGLRKPVKTAPGKKRPVEHSPVEPDSSSGTGKAGQQPARKRLNFGQTGDADSVPDPQPLGQPPAAPSGLGSTTMATGSGAPMADNNEGADGVGNSSGNWHCDSQWLDDRVIATSTRTWALPTYNNHLYKQISSQSGACNDNHYFGYSTPWGYFDFNRFHCHFSPRDWQRLINSNWGFRPKRLNFKLFNIQVKEVTQNDGTTTIANNLTSTVQVFTDSEYQLPYVPGSAHQGCLPPFPADVFMVPQYGYLTLNNGSQAVGRSSFYCLEYFPSQMLRTGNNFQFSYTFEDVPFHSSYAHCQSLDRLMNPLIDQYLYYLNKTQTNSGTLQQSRLLFSQAGPTNMSLQAKNWLPGPCYRQQRLSKQANDNNNCNFPWTAATKYHLNGRDSLVNPGPAMASHKDDEEKFFPMHGTLIFGKQGTNANDADLENVMITDEEEIRPTNPVATEQYGTVSNNLQNSNTGPTTGTVNHQGALPGMVWQDRDVYLQGPIWAKIPHTDGHFHPSPLMGGFGLKHPPPQIMIKSTPVPANPPTNFSSAKFASSITQYSTGQVSVEIEWELQKENSKRWNPEIQYTSNYNKSVNVDFTVDTNGVYSEPRPIGTRYLTRNL

SEQ ID NO: 258 - DNA, 2208 bp, Adeno-associated virus
atggctgccgatggttatcttccagattggctcgaggacactctctctgaaggaataagacagtggtggaagctcaaacctggcccaccaccaccaaagcccgcagagcggcataaggacgacagcaggggtcttgtgcttcctgggtacaagtacctcggacccttcaacggactcgacaagggagagccggtcaacgaggcagacgccgcggccctcgagcacgacaaggcctacgaccggcagctcgacagcggagacaacccgtacctcaagtacaaccacgccgacgcggagtttcaggagcgccttaaagaggatacgtcttttgggggcaacctcggacgagcagtcttccaggcaaaaaagagggttctggaacctctgggcctggttgaggagcctgttaagacggctccgggaaaaaagaggccggtagagcactctcctgcagagccagattcctcctccggaactggaaagtcgggcaaccagcctgcaagaaagagattgaatttcggtcagactggagactcagactccgtacctgacccccagcctctcggacagccaccagcagccccctctggtctgggaactaatacgatggctacaggcagtggcgcaccaatggcagacaataacgagggcgccgacggagtgggtaattcctcgggaaattggcattgcgattccacatggatgggcgacagagtcatcaccaccagcacccgaacctgggccctgcccacctacaacaaccatctgtacaagcaaatatccagccagtctggagccagcaacgacaatcactactttggctacagcaccccctgggggtattttgacttcaacagattccactgccacttttcaccacgtgactggcaaagactcatcaacaacaactggggattccgacccaagagactcaacttcaagctctttaacattcaagtcaaagaggtcacgcagaatgacggtacgacgacgattgccaataaccttaccagcacggttcaggtgtttactgactcggagtaccagctcccgtacgtcctcggctcggcgcatcaaggatgcctcccgccgttcccagcagacgtcttcatggtgccacagtatggatacctcaccctgaacaacgggagtcaggcagtaggacgctcttcattttactgcctagagtactttccttctcagatgctgcgtaccggaaacagctttaccttcagctacacctttgaggacgttcctttccacagcagctacgctcacagccagagtttggaccgtctcatgaatcctctcatcgaccagtacctgtattacttgagcagaacaaacactccaagcggaaccaccacgcagtccaggcttcagttttctcaggccggagcgagtgacattcgggaccagtctaggaactggcttcctggaccctgttaccgtcagcagcgagtatcaaagacatctgcggataacaacaacagtgaatactcgtggactggagctaccaagtaccacctcaatggcagagactctctggtgaatccgggcccggccatggccagccacaaagacgatgaagaaaagttctttcctcagagcggggttcttatctttgggaagcaaggctcagagaaaacaaatgtggatattgaaaaggtcatgattacagacgaagaggaaatcaggaccaccaatcccgtggctacggagcagtatggttctgtatctaccaacctccagagcggcaacacacaagcagctaccgcagatgtcaacacacaaggcgttcttccaggcatggtctggcaagacagagacgtgtacctgcaggggcctatttgggcaaagattccacacacggacggacattttcacccctctcccctcatgggcggatttggacttaaacaccctcctccacagattctcatcaagaacaccccggtacctgcgaatccttcgaccaccttcagtgcggcaaagtttgcttccttcattacacagtactccacggggcaggtcagcgtggagatcgagtgggagctgcagaaggagaacagcaaacgctggaatcccgagatccagtacacttccaactacaacaagtctgttaatgtggactttactgtggacactaatggcgtgtattcagagcctcgccccattggcaccagatacctgactcgtaatctgtaa

SEQ ID NO: 259 - protein, 735 aa, Adeno-associated virus
MAADGYLPDWLEDTLSEGIRQWWKLKPGPPPPKPAERHKDDSRGLVLPGYKYLGPFNGLDKGEPVNEADAAALEHDKAYDRQLDSGDNPYLKYNHADAEFQERLKEDTSFGGNLGRAVFQAKKRVLEPLGLVEEPVKTAPGKKRPVEHSPAEPDSSSGTGKSGNQPARKRLNFGQTGDSDSVPDPQPLGQPPAAPSGLGTNTMATGSGAPMADNNEGADGVGNSSGNWHCDSTWMGDRVITTSTRTWALPTYNNHLYKQISSQSGASNDNHYFGYSTPWGYFDFNRFHCHFSPRDWQRLINNNWGFRPKRLNFKLFNIQVKEVTQNDGTTTIANNLTSTVQVFTDSEYQLPYVLGSAHQGCLPPFPADVFMVPQYGYLTLNNGSQAVGRSSFYCLEYFPSQMLRTGNSFTFSYTFEDVPFHSSYAHSQSLDRLMNPLIDQYLYYLSRTNTPSGTTTQSRLQFSQAGASDIRDQSRNWLPGPCYRQQRVSKTSADNNNSEYSWTGATKYHLNGRDSLVNPGPAMASHKDDEEKFFPQSGVLIFGKQGSEKTNVDIEKVMITDEEEIRTTNPVATEQYGSVSTNLQSGNTQAATADVNTQGVLPGMVWQDRDVYLQGPIWAKIPHTDGHFHPSPLMGGFGLKHPPPQILIKNTPVPANPSTTFSAAKFASFITQYSTGQVSVEIEWELQKENSKRWNPEIQYTSNYNKSVNVDFTVDTNGVYSEPRPIGTRYLTRNL

SEQ ID NO: 260 - DNA, 2211 bp, Adeno-associated virus; identical to SEQ ID NO: 150

SEQ ID NO: 261 - protein, 736 aa, Adeno-associated virus
MAADGYLPDWLEDTLSEGIRQWWKLKPGPPPPKPAERHKDDSRGLVLPGYKYLGPGNGLDKGEPVNAADAAALEHDKAYDQQLKAGDNPYLKYNHADAEFQERLKEDTSFGGNLGRAVFQAKKRLLEPLGLVEEAAKTAPGKKRPVEQSPQEPDSSAGIGKSGSQPAKKKLNFGQTGDTESVPDPQPIGEPPAAPSGVGSLTMASGGGAPVADNNEGADGVGSSSGNWHCDSQWLGDRVITTSTRTWALPTYNNHLYKQISNSTSGGSSNDNAYFGYSTPWGYFDFNRFHCHFSPRDWQRLINNNWGFRPKRLNFKLFNIQVKEVTDNNGVKTIANNLTSTVQVFTDSDYQLPYVLGSAHEGCLPPFPADVFMIPQYGYLTLNDGGQAVGRSSFYCLEYFPSQMLRTGNNFQFSYEFENVPFHSSYAHSQSLDRLMNPLIDQYLYYLSKTINGSGQNQQTLKFSVAGPSNMAVQGRNYIPGPSYRQQRVSTTVTQNNNSEFAWPGASSWALNGRNSLMNPGPAMASHKEGEDRFFPLSGSLIFGKQGTGRDNVDADKVMITNEEEIKTTNPVATESYGQVATNHQSAQAQAQTGWVQNQGILPGMVWQDRDVYLQGPIWAKIPHTDGNFHPSPLMGGFGMKHPPPQILIKNTPVPADPPTAFNKDKLNSFITQYSTGQVSVEIEWELQKENSKRWNPEIQYTSNYYKSNNVEFAVSTEGVYSEPRPIGTRYLTRNL

SEQ ID NO: 262 - DNA, 2211 bp, Adeno-associated virus
atggctgccgatggttatcttccagattggctcgaggacactctctctgaaggaataagacagtggtggaagctcaaacctggcccaccaccaccaaagcccgcagagcggcataaggacgacagcaggggtcttgtgcttcctgggtacaagtacctcggacccggcaacggactcgacaagggggagccggtcaacgcagcagacgcggcggccctcgagcacgacaaggcctacgaccagcagctcaaggccggagacaacccgtacctcaagtacaaccacgccgacgccgagttccaggagcggctcaaagaagatacgtcttttgggggcaacctcgggcgagcagtcttccaggccaaaaagaggcttcttgaacctcttggtctggttgaggaagcggctaagacggctcctggaaagaagaggcctgtagagcagtctcctcaggaaccggactcctccgcgggtattggcaaatcgggttcacagcccgctaaaaagaaactcaatttcggtcagactggcgacacagagtcagtccccgaccctcaaccaatcggagaacctcccgcagccccctcaggtgtgggatctcttacaatggcttcaggtggtggcgcaccagtggcagacaataacgaaggtgccgatggagtgggtagttcctcgggaaattggcattgcgattcccaatggctgggggacagagtcatcaccaccagcacccgaacctgggccctgcccacctacaacaatcacctctacaagcaaatctccaacagcacatctggaggatcttcaaatgacaacgcctacttcggctacagcaccccctgggggtattttgacttcaacagattccactgccacttctcaccacgtgactggcagcgactcatcaacaacaactggggattccggcctaagcgactcaacttcaagctcttcaacattcaggtcaaagaggttacggacaacaatggagtcaagaccatcgccaataaccttaccagcacggtccaggtcttcacggactcagactatcagctcccgtacgtgctcgggtcggctcacgagggctgcctcccgccgttcccagcggacgttttcatgattcctcagtacgggtatctgacgcttaatgatgggagccaggccgtgggtcgttcgtccttttactgcctggaatatttcccgtcgcaaatgctaagaacgggtaacaacttccagttcagctacgagtttgagaacgtacctttccatagcagctacgctcacagccaaagcctggaccgactaatgaatccactcatcgaccaatacttgtactatctctcaaagactattaacggttctggacagaatcaacaaacgctaaaattcagcgtggccggacccagcaacatggctgtccagggaagaaactacatacctggacccagctaccgacaacaacgtgtctcaaccactgtgactcaaaacaacaacagcgaatttgcttggcctggagcttcttcttgggctctcaatggacgtaatagcttgatgaatcctggacctgctatggccagccacaaagaaggagaggaccgtttctttcctttgtctggatctttaatttttggcaaacaaggaactggaagagacaacgtggatgcggacaaagtcatgataaccaacgaagaagaaattaaaactactaacccggtagcaacggagtcctatggacaagtggccacaaaccaccagagtgcccaagcacaggcgcagaccggctgggttcaaaaccaaggaatacttccgggtatggtttggcaggacagagatgtgtacctgcaaggacccatttgggccaaaattcctcacacggacggcaactttcacccttctccgctaatgggagggtttggaatgaagcacccgcctcctcagatcctcatcaaaaacacacctgtacctgcggatcctccaacggctttcaataaggacaagctgaactctttcatcacccagtattctactggccaagtcagcgtggagattgagtgggagctgcagaaggaaaacagcaagcgctggaacccggagatccagtacacttccaactattacaagtctaataatgttgaatttgctgttaatactgaaggtgtatatagtgaaccccgccccattggcaccagatacctgactcgtaatctgtaa

SEQ ID NO: 263 - protein, 736 aa, Adeno-associated virus
MAADGYLPDWLEDTLSEGIRQWWKLKPGPPPPKPAERHKDDSRGLVLPGYKYLGPGNGLDKGEPVNAADAAALEHDKAYDQQLKAGDNPYLKYNHADAEFQERLKEDTSFGGNLGRAVFQAKKRLLEPLGLVEEAAKTAPGKKRPVEQSPQEPDSSAGIGKSGSQPAKKKLNFGQTGDTESVPDPQPIGEPPAAPSGVGSLTMASGGGAPVADNNEGADGVGSSSGNWHCDSQWLGDRVITTSTRTWALPTYNNHLYKQISNSTSGGSSNDNAYFGYSTPWGYFDFNRFHCHFSPRDWQRLINNNWGFRPKRLNFKLFNIQVKEVTDNNGVKTIANNLTSTVQVFTDSDYQLPYVLGSAHEGCLPPFPADVFMIPQYGYLTLNDGSQAVGRSSFYCLEYFPSQMLRTGNNFQFSYEFENVPFHSSYAHSQSLDRLMNPLIDQYLYYLSKTINGSGQNQQTLKFSVAGPSNMAVQGRNYIPGPSYRQQRVSTTVTQNNNSEFAWPGASSWALNGRNSLMNPGPAMASHKEGEDRFFPLSGSLIFGKQGTGRDNVDADKVMITNEEEIKTTNPVATESYGQVATNHQSAQAQAQTGWVQNQGILPGMVWQDRDVYLQGPIWAKIPHTDGNFHPSPLMGGFGMKHPPPQILIKNTPVPADPPTAFNKDKLNSFITQYSTGQVSVEIEWELQKENSKRWNPEIQYTSNYYKSNNVEFAVNTEGVYSEPRPIGTRYLTRNL

SEQ ID NO: 264 - DNA, 2208 bp, Adeno-associated virus
atggctgccgatggttatcttccagattggctcgaggacactctctctgaaggaataagacagcggtggaagctcaaacctggcccaccaccaccagagcccgcagagcggcataaggacgacagcaggggtcttgtgcttcctgggtacaagtacctcggacccttcaacggactcgacaagggagagccggtcaacgaggcagacgccgcggccctcgagcacgacaaagcctacgaccggcagctcgacagcggagacaacccgtacctcaagtacaaccacgccgacgcggagtttcaggagcgccttaaagaagatacgtcttttgggggcaacctcggacgagcagtcttccaggcgaaaaagagggtacttgaacctctgggcctggttgaggaacctgttaagacggctccgggaaaaaagaggccggtagagcactctcctgtggagccagactcctcctcgggaaccggaaaggcgggccagcagcctgcaagaaaaagattgaattttggtcagactggagacgcagactcagtacctgacccccagcctctcggacagccaccagcagccccctctggtctgggaactaatacgatggctacaggcagtggcgcaccaatggcagacaataacgagggcgccgacggagtgggtaattcctcgggaaattggcattgcgattccacatggatgggcgacagagtcatcaccaccagcacccgaacctgggccctgcccacctacaacaaccacctctacaaacaaatttccagccaatcaggagcctcgaacgacaatcactactttggctacagcaccccttgggggtattttgacttcaacagattccactgccacttttcaccacgtgactggcaaagactcatcaacaacaactggggattccgacccaagagactcaacttcaagctctttaacattcaagtcaaagaggtcacgcagaatgacggtacgacgacgattgccaataaccttaccggcacggttcaggtgtttactgactcggagtaccagctcccgtacgtcctcggctcggcgcatcaaggatgcctcccgccgttcccagcagacgtcttcatggtgccacagtatggatacctcaccctgaacaacgggagtcaggcagtaggacgctcttcattttactgcctggagtactttccttctcagatgctgcgtaccggaaacaactttaccttcagctacacttttgaggacgttcctttccacagcagctacgctcacagccagagtctgggccgtctcatgaatcctctcatcgaccagtacctgtattacttgagcagaacaaacactccaagtggaaccaccacgcagtcaaggcttcagttttctcaggccggagcgagtgacattcgggaccagtctaggaactggcttcctggaccctgttaccgccagcagcgagtatcaaagacatctgcggataacaacaacagtgaatactcgtggactggagctaccaagtaccacctcaatggcagagactctctggtgaatccgggcccggccatggcaagccacaaggacgatgaagaaaagttttttcctcagagcggggttctcatctttgggaagcaaggctcagagaaaacaaatgtggacattgaaaaggtcatgattacagacgaagaggaaatcaggacaaccaatcccgtggctacggagcagtatggttctgtatctaccaacctccagagaggcaacagacaagcagctaccgcagatgtcaacacacaaggcgttcttccaggcatggtctggcaggacagagatgtgtaccttcaggggcccatctgggcaaagattccacacacggacggacattttcacccctctcccctcatgggtggattcggacttaaacaccctcctccacagattctcatcaagaacaccccggtacctgcgaatccttcgaccaccttcagtgcggcaaagtttgcttccttcatcacacagtactccacgggacaggtcagcgtggagatcgagtgggagctgcagaaggaaaacagcaaacgctggaatcccgaaattcagtacacttccaactacaacaagtctgttaatgtggactttactgtggacactaatggcgtgtattcagagcctcgccccattggcaccagatacctgactcgtaatctgtaa

SEQ ID NO: 265 - protein, 735 aa, Adeno-associated virus
MAADGYLPDWLEDTLSEGIRQRWKLKPGPPPPEPAERHKDDSRGLVLPGYKYLGPFNGLDKGEPVNEADAAALEHDKAYDRQLDSGDNPYLKYNHADAEFQERLKEDTSFGGNLGRAVFQAKKRVLEPLGLVEEPVKTAPGKKRPVEHSPVEPDSSSGTGKAGQQPARKRLNFGQTGDADSVPDPQPLGQPPAAPSGLGTNTMATGSGAPMADNNEGADGVGNSSGNWHCDSTWMGDRVITTSTRTWALPTYNNHLYKQISSQSGASNDNHYFGYSTPWGYFDFNRFHCHFSPRDWQRLINNNWGFRPKRLNFKLFNIQVKEVTQNDGTTTIANNLTGTVQVFTDSEYQLPYVLGSAHQGCLPPFPADVFMVPQYGYLTLNNGSQAVGRSSFYCLEYFPSQMLRTGNNFTFSYTFEDVPFHSSYAHSQSLGRLMNPLIDQYLYYLSRTNTPSGTTTQSRLQFSQAGASDIRDQSRNWLPGPCYRQQRVSKTSADNNNSEYSWTGATKYHLNGRDSLVNPGPAMASHKDDEEKFFPQSGVLIFGKQGSEKTNVDIEKVMITDEEEIRTTNPVATEQYGSVSTNLQRGNRQAATADVNTQGVLPGMVWQDRDVYLQGPIWAKIPHTDGHFHPSPLMGGFGLKHPPPQILIKNTPVPANPSTTFSAAKFASFITQYSTGQVSVEIEWELQKENSKRWNPEIQYTSNYNKSVNVDFTVDTNGVYSEPRPIGTRYLTRNL

SEQ ID NO: 266 - DNA, 2208 bp, Adeno-associated virus
atggctgccgatggttatcttccagattggctcgaggacactctctctgaaggaataagacagcggtggaagctcaaacctggcccaccaccaccagagcccgcagagcggcataaggacgacagcaggggtcttgtgcttcctgggtacaagtacctcggacccttcaacggactcgacaagggagagccggtcaacgaggcagacgccgcggccctcgagcacgacaaagcctacgaccggcagctcgacagcggagacaacccgtacctcaagtacaaccacgccgacgcggagtttcaggagcgccttaaagaagatacgtcctttgggggcaacctcggacgagcagtcttccaggcgaaaaagagggtacttgaacctctgggcctggttgaggaacctgttaagacggctccgggaaaaaagaggccggtagagcactctcctgtggagccagactcctcctcgggaaccggaaaggcgggccagcagcctgcaagaaaaagattgaattttggtcagactggagacgcagactcagtacctgacccccagcctctcggacagccaccagcagccccctctggtctgggaactaatacgatggctacaggcagtggcgcaccaatggcagacaataacgagggcgccgacggagtgggtaattcctcgggaaattggcattgcgattccacatggatgggcgacagagtcatcaccaccagcacccgaacctgggccctgcccacctacaacaaccacctctacaaacaaatttccagccaatcaggagcctcgaacgacaatcactactttggctacagcaccccttgggggtattttgacttcaacagattccactgccacttttcaccacgtgactggcaaagactcatcaacaacaactggggattccgacccaagagactcaacttcaagctctttaacattcaagtcaaagaggtcacgcagaatgacggtacgacgacgattgccaataaccttaccagcacggttcaggtgtttactgactcggagtaccagctcccgtacgtcctcggctcggcgcatcaaggatgcctcccgccgttcccagcagacgtcttcatggtgccacagtatggatacctcaccctgaacaacgagagtcaggcagtaggacgctcttcattttactgcctggagtactttccttctcagatgctgcgtaccggaaacaactttaccttcagctacacttttgaggacgttcctttccacagcagctacgctcacagccagagtctgggccgtctcatgaatcctctcatcgaccagtacctgtattacttgagcagaacaaacactccaagtggaaccaccacgcagtcaaggcttcagttttctcaggccggagcgagtgacattcgggaccagtctaggaactggcttcctggaccctgttaccgccagcagcgagtatcaaagacatctgcggataacaacaacagtgaatactcgtggactggagctaccaagtaccacctcaatggcagagactctctggtgaatccgggcccggccatggcaagccacaaggacgatgaagaaaagttttttcctcagagcggggttctcatctttgggaagcaaggctcagagaaaacaaatgtggacattgaaaaggtcatgattacagacgaagaggaaatcaggacaaccaatcccgtggctacggagcagtatggttctgtatctaccaacctccagagaggcaacagacaagcagctaccgcagatgtcaacacacaaggcgttcttccaggcatggtctggcaggacagagatgtgtaccttcaggggcccatctgggcaaagattccacacacggacggacattttcacccctctcccctcatgggtggattcggacttaaacaccctcctccacagattctcatcaagaacaccccggtacctgcgaatccttcgaccaccttcagtgcggcaaagtttgcttccttcatcacacagtactccacgggacaggtcagcgtggagatcgagtgggagctgcagaaggaaaacagcaaacgctggaatcccgaaattcagtacacttccaactacaacaagtctgttaatgtggactttactgtggacactaatggcgtgtattcagagcctcgccccattggcaccagatacctgactcgtaatctgtaa

SEQ ID NO: 267 - protein, 735 aa, Adeno-associated virus
MAADGYLPDWLEDTLSEGIRQRWKLKPGPPPPEPAERHKDDSRGLVLPGYKYLGPFNGLDKGEPVNEADAAALEHDKAYDRQLDSGDNPYLKYNHADAEFQERLKEDTSFGGNLGRAVFQAKKRVLEPLGLVEEPVKTAPGKKRPVEHSPVEPDSSSGTGKAGQQPARKRLNFGQTGDADSVPDPQPLGQPPAAPSGLGTNTMATGSGAPMADNNEGADGVGNSSGNWHCDSTWMGDRVITTSTRTWALPTYNNHLYKQISSQSGASNDNHYFGYSTPWGYFDFNRFHCHFSPRDWQRLINNNWGFRPKRLNFKLFNIQVKEVTQNDGTTTIANNLTSTVQVFTDSEYQLPYVLGSAHQGCLPPFPADVFMVPQYGYLTLNNESQAVGRSSFYCLEYFPSQMLRTGNNFTFSYTFEDVPFHSSYAHSQSLGRLMNPLIDQYLYYLSRTNTPSGTTTQSRLQFSQAGASDIRDQSRNWLPGPCYRQQRVSKTSADNNNSEYSWTGATKYHLNGRDSLVNPGPAMASHKDDEEKFFPQSGVLIFGKQGSEKTNVDIEKVMITDEEEIRTTNPVATEQYGSVSTNLQRGNRQAATADVNTQGVLPGMVWQDRDVYLQGPIWAKIPHTDGHFHPSPLMGGFGLKHPPPQILIKNTPVPANPSTTFSAAKFASFITQYSTGQVSVEIEWELQKENSKRWNPEIQYTSNYNKSVNVDFTVDTNGVYSEPRPIGTRYLTRNL

SEQ ID NO: 268 - DNA, 2208 bp, Adeno-associated virus
atggctgccgatggttatcttccagattggctcgaggacactctctctgaaggaataagacagcggtggaagctcaaacctggcccaccaccaccagagcccgcagagcggcataaggacgacagcaggggtcttgtgcttcctgggtacaagtacctcggacccttcaacggactcgacaagggagagccggtcaacgaggcagacgccgcggccctcgagcacgacaaagcctacgaccggcagctcgacagcggagacaacccgtacctcaagtacaaccacgccgacgcggagtttcaggagcgccttaaagaagatacgtcttttgggggcaacctcggacgagcagtcttccaggcgaaaaagagggtacttgaacctctgggcctggttgaggaacctgttaagacggctccgggaaaaaagaggccggtagagcactctcctgtggagccagactcctcctcgggaaccggaaaggcgggccagcagcctgcaagaaaaagattgaattttggtcagactggagacgcagactcagtacctgacccccagcctctcggacagccaccagcagccccctctggtctgggaactaatacgatggctacaggcagtggcgcaccaatggcagacaataacgagggcgccgacggagtgggtaattcctcgggaaattggcattgcgattccacatggatgggcgacagagtcatcaccaccagcacccgaacctgggccctgcccacctacaacaaccacctctacaaacaaatttccagccaatcaggagcctcgaacgacaatcactactttggctacagcaccccttgggggtattttgacttcaacagattccactgccacttttcaccacgtgactggcaaagactcatcaacaacaactggggattccgacccaagagactcaacttcaagctctttaacattcaagtcaaagaggtcacgcagaatgacggtacgacgacgattgccaataaccttaccagcacggttcaggtgtttactgactcggagtaccagctcccgtacgtcctcggctcggcgcatcaaggatgcctcccgccgttcccagcagacgtcttcatggtaccacagtatggatacctcaccctgaacaacgggagtcaggcagtaggacgctcttcattttactgcctggagtactttccttctcagatgctgcgtaccggaaacaactttaccttcagctacacttttgaggacgttcctttccacagcagctacgctcacagccagagtctgggccgtctcatgaatcctctcatcgaccagtacctgtattacttgagcagaacaaacactccaagtggaaccaccacgcagtcaaggcttcagttttctcaggccggagcgagtgacattcgggaccagtctaggaactggcttcctggaccctgttaccgccagcagcgagtatcaaagacatctgcggataacaacaacagtgaatactcgtggactggagctaccaagtaccacctcaatggcagagactctctggtgaatccgggcccggccatggcaagccacaaggacgatgaagaaaagttttttcctcagagcggggttctcatctttgggaagcaaggctcagagaaaacaaatgtggacattgaaaaggtcatgattacagacgaagaggaaatcaggacaaccaatcccgtggctacggagcagtatggttctgtatctaccaacctccagagaggcaacagacaagcagctaccgcagatgtcaacacacaaggcgttcttccaggcatggtctggcaggacagagatgtgtaccttcaggggcccatctgggcaaagattccacacacggacggacattttcacccctctcccctcatgggtggattcggacttaaacaccctcctccacagattctcatcaagaacaccccggtacctgcgaatccttcgaccaccttcagtgcggcaaagtttgcttccttcatcacacagtactccacgggacaggtcagcgtggagatcgagtgggagctgcagaaggaaaacagcaaacgctggaatcccgaaattcagtacacttccaactacaacaagtctgttaatgtggactttactgtggacactaatggcgtgtattcagagcctcgccccattggcaccagatacctgactcgtaatctgtaa

SEQ ID NO: 269 - protein, 735 aa, Adeno-associated virus
MAADGYLPDWLEDTLSEGIRQRWKLKPGPPPPEPAERHKDDSRGLVLPGYKYLGPFNGLDKGEPVNEADAAALEHDKAYDRQLDSGDNPYLKYNHADAEFQERLKEDTSFGGNLGRAVFQAKKRVLEPLGLVEEPVKTAPGKKRPVEHSPVEPDSSSGTGKAGQQPARKRLNFGQTGDADSVPDPQPLGQPPAAPSGLGTNTMATGSGAPMADNNEGADGVGNSSGNWHCDSTWMGDRVITTSTRTWALPTYNNHLYKQISSQSGASNDNHYFGYSTPWGYFDFNRFHCHFSPRDWQRLINNNWGFRPKRLNFKLFNIQVKEVTQNDGTTTIANNLTSTVQVFTDSEYQLPYVLGSAHQGCLPPFPADVFMVPQYGYLTLNNGSQAVGRSSFYCLEYFPSQMLRTGNNFTFSYTFEDVPFHSSYAHSQSLGRLMNPLIDQYLYYLSRTNTPSGTTTQSRLQFSQAGASDIRDQSRNWLPGPCYRQQRVSKTSADNNNSEYSWTGATKYHLNGRDSLVNPGPAMASHKDDEEKFFPQSGVLIFGKQGSEKTNVDIEKVMITDEEEIRTTNPVATEQYGSVSTNLQRGNRQAATADVNTQGVLPGMVWQDRDVYLQGPIWAKIPHTDGHFHPSPLMGGFGLKHPPPQILIKNTPVPANPSTTFSAAKFASFITQYSTGQVSVEIEWELQKENSKRWNPEIQYTSNYNKSVNVDFTVDTNGVYSEPRPIGTRYLTRNL

SEQ ID NO: 270 - DNA, 2208 bp, Adeno-associated virus
atggctgccgatggttatcttccagattggctcgaggacactctctctgaaggaataagacagcggtggaagctcaaacctggcccaccaccaccagagcccgcagagcggcataaggacgacagcaggggtcttgtgcttcctgggtacaagtacctcggacccttcaacggactcgacaagggagagccggtcaacgaggcagacgccgcggccctcgagcacgacaaagcctacgaccggcagctcgacagcggagacaacccgtacctcaagtacaaccacgccgacgcggagtttcaggagcgccttaaagaagatacgtcttttgggggcaacctcggacgagcagtcttccaggcgaaaaagagggtactcgaacctctgggcctggttgaggaacctgttaagacggctccgggaaaaaagaggccggtagagcactctcctgtggagccagactcctcctcgggaaccggaaaggcgggccagcagcctgcaagaaaaagattgaattttggtcagactggagacgcagactcagtacctgacccccagcctctcggacagccaccagcagccccctctggtctgggaactaatacgatggctacaggcagtggcgcaccaatggcagacaataacgagggcgccgacggagtgggtaattcctcgggaaattggcattgcgattccacatggatgggcgacagagtcatcaccaccagcacccgaacctgggccctgcccacctacaacaaccacctctacaaacaaatttccagccaatcaggagcctcgaacgacaatcactactttggctacagcaccccttgggggtattttgacttcaacagattccactgccacttttcaccacgtgactggcaaagactcatcaacaacaactggggattccgacccaagagactcaacttcaagctctttaacattcaagtcaaagaggtcacgcagaatgacggtacgacgacgattgccaataaccttaccagcacggttcaggtgtttactgactcggagtaccagctcccgtacgtcctcggctcggcgcatcaaggatgcctcccgccgttcccagcagacgtcttcatggtgccacagtatggatacctcaccctgaacaacgggagtcaggcagcaggacgctcttcattttactgcctggagtactttccttctcagatgctgcgtaccggaaacaactttaccttcagctacacttttgaggacgttcctttccacagcagctacgctcacagccagagtctgggccgtctcatgaatcctctcatcgaccagtacctgtattacttgagcagaacaaacactccaagtggaaccaccacgcagtcaaggcttcagttttctcaggccggagcgagtgacattcgggaccagtctaggaactggcttcctggaccctgttaccgccagcagcgagtatcaaagacatctgcggataacaacaacagtgaatactcgtggactggagctaccaagtaccacctcaatggcagagactctctggtgaatccgggcccggccatggcaagccacaaggacgatgaagaaaagttttttcctcagagcggggttctcatctttgggaagcaaggctcagagaaaacaaatgtggacattgaaaaggtcatgattacagacgaagaggaaatcaggacaaccaatcccgtggctacggagcagtatggttctgtatctaccaacctccagagaggcaacagacaagcagctaccgcagatgtcaacacacaaggcgttcttccaggcatggtctggcaggacagagatgtgtaccttcaggggcccatctgggcaaagattccacacacggacggacattttcacccctctcccctcatgggtggattcggacttaaacaccctcctccacagattctcatcaagaacaccccggtacctgcgaatccttcgaccaccttcagtgcggcaaagtttgcttccttcatcacacagtactccacgggacaggtcagcgtggagatcgagtgggagctgcagaaggaaaacagcaaacgctggaatcccgaaattcagtacacttccaactacaacaagtccgttaatgtggactttactgtggacactaatggcgtgtattcagagcctcgccccattggcaccagatacctgactcgtaatctgtaa

SEQ ID NO: 271 - protein, 735 aa, Adeno-associated virus
MAADGYLPDWLEDTLSEGIRQRWKLKPGPPPPEPAERHKDDSRGLVLPGYKYLGPFNGLDKGEPVNEADAAALEHDKAYDRQLDSGDNPYLKYNHADAEFQERLKEDTSFGGNLGRAVFQAKKRVLEPLGLVEEPVKTAPGKKRPVEHSPVEPDSSSGTGKAGQQPARKRLNFGQTGDADSVPDPQPLGQPPAAPSGLGTNTMATGSGAPMADNNEGADGVGNSSGNWHCDSTWMGDRVITTSTRTWALPTYNNHLYKQISSQSGASNDNHYFGYSTPWGYFDFNRFHCHFSPRDWQRLINNNWGFRPKRLNFKLFNIQVKEVTQNDGTTTIANNLTSTVQVFTDSEYQLPYVLGSAHQGCLPPFPADVFMVPQYGYLTLNNGSQAAGRSSFYCLEYFPSQMLRTGNNFTFSYTFEDVPFHSSYAHSQSLGRLMNPLIDQYLYYLSRTNTPSGTTTQSRLQFSQAGASDIRDQSRNWLPGPCYRQQRVSKTSADNNNSEYSWTGATKYHLNGRDSLVNPGPAMASHKDDEEKFFPQSGVLIFGKQGSEKTNVDIEKVMITDEEEIRTTNPVATEQYGSVSTNLQRGNRQAATADVNTQGVLPGMVWQDRDVYLQGPIWAKIPHTDGHFHPSPLMGGFGLKHPPPQILIKNTPVPANPSTTFSAAKFASFITQYSTGQVSVEIEWELQKENSKRWNPEIQYTSNYNKSVNVDFTVDTNGVYSEPRPIGTRYLTRNL

SEQ ID NO: 272 - protein, 738 aa, Adeno-associated virus; identical to SEQ ID NO: 114

SEQ ID NO: 273 - DNA, 2217 bp, Adeno-associated virus
atggctgctgacggttatcttccagattggctcgaggacaacctctctgagggcattcgcgagtggtgggacctgaaacctggagcccccaagcccaaggccaaccagcagaagcaggacgacggccggggtctggtgcttcctggctacaagtacctcggacccttcaacggactcgacaagggggagcccgtcaacgcggcggacgcagcggccctcgagcacgacaaggcctacgaccagcagctcaaagcgggtgacaatccgtacctgcggtataaccacgccgacgccgagtttcaggagcgtctgcaagaagatacgtcttttgggggcaacctcgggcgagcagtcttccaggccaagaagcgggttctcgaacctctcggtctggttgaggaagctgctaagacggctcctggaaagaagagaccggtagaaccgtcacctcagcgttcccccgactcctccacgggcatcggcaagaaaggccagcagcccgctaaaaagagactgaactttggtcagactggcgactcagagtcagtccccgaccctcaaccaatcggagaaccaccagcaggcccctctggtctgggatctggtacaatggctgcaggcggtggcgctccaatggcagacaataacgaaggcgccgacggagtgggtagttcctcaggaaattggcattgcgattccacatggctgggcgacagagtcatcaccaccagcacccgaacctgggccctgcccacctacaacaaccacctctacaagcaaatatccaatgggacatcgggaggaagcaccaacgacaacacctacttcggctacagcaccccctgggggtattttgacttcaacagattccactgccacttctcaccacgtgactggcagcgactcatcaacaacaactggggattccggccaaaaagactcagcttcaagctcttcaacatccaggtcaaggaggtcacgcagaatgaaggcaccaagaccatcgccaataaccttaccagcacgattcaggtatttacggactcggaataccagctgccgtacgtcctcggctccgcgcaccagggctgcctgcctccgttcccggcggacgtcttcatgattccccagtacggctaccttacactgaacaatggaagtcaagccgtaggccgttcctccttctactgcctggaatattttccatctcaaatgctgcgaactggaaacaattttgaattcagctacaccttcgaggacgtgcctttccacagcagctacgcacacagccagagcttggaccgactgatgaatcctctcatcgaccagtacctgtactacttatccagaactcagtccacaggaggaactcaaggtacccagcaattgttattttctcaagctgggcctgcaaacatgtcggctcaggctaagaactggctacctggaccttgctaccggcagcagcgagtctctacgacactgtcgcaaaacaacaacagcaactttgcttggactggtgccaccaaatatcacctgaacggaagagactctttggtaaatcccggtgtcgccatggcaacccacaaggacgacgaggaacgcttcttcccgtcgagtggagtcctgatgttcggaaaacagggtgctggaagagacaatgtggactacagcagcgttatgctaaccagcgaagaagaaattaaaaccactaaccccgtagccacagaacaatacggtgtggtggctgacaacttgcagcaaaccaatacagggcctattgtgggaaatgtcaacagccaaggagccttacctggcatggtctggcagaaccgagacgtgtacctgcagggtcccatctgggccaagattcctcacacggacggcaacttccacccttcaccgctaatgggaggatttggactgaagcacccacctcctcagatcctgatcaagaacacgccggtacctgcggatcctccaacaacgttcagccaggcgaaattggcttccttcattacgcagtacagcaccggacaggtcagcgtggaaatcgagtgggagctgcagaaggagaacagcaaacgctggaacccagagattcagtacacttcaaactactacaaatctacaaatgtggactttgctgtcaatacagagggaacttattctgagcctcgccccattggtactcgttacctcacccgtaatctgtaa

SEQ ID NO: 274 - protein, 738 aa, Adeno-associated virus
MAADGYLPDWLEDNLSEGIREWWDLKPGAPKPKANQQKQDDGRGLVLPGYKYLGPFNGLDKGEPVNAADAAALEHDKAYDQQLKAGDNPYLRYNHADAEFQERLQEDTSFGGNLGRAVFQAKKRVLEPLGLVEEAAKTAPGKKRPVEPSPQRSPDSSTGIGKKGQQPAKKRLNFGQTGDSESVPDPQPIGEPPAGPSGLGSGTMAAGGGAPMADNNEGADGVGSSSGNWHCDSTWLGDRVITTSTRTWALPTYNNHLYKQISNGTSGGSTNDNTYFGYSTPWGYFDFNRFHCHFSPRDWQRLINNNWGFRPKRLSFKLFNIQVKEVTQNEGTKTIANNLTSTIQVFTDSEYQLPYVLGSAHQGCLPPFPADVFMIPQYGYLTLNNGSQAVGRSSFYCLEYFPSQMLRTGNNFEFSYTFEDVPFHSSYAHSQSLDRLMNPLIDQYLYYLSRTQSTGGTQGTQQLLFSQAGPANMSAQAKNWLPGPCYRQQRVSTTLSQNNNSNFAWTGATKYHLNGRDSLVNPGVAMATHKDDEERFFPSSGVLMFGKQGAGRDNVDYSSVMLTSEEEIKTTNPVATEQYGVVADNLQQTNTGPIVGNVNSQGALPGMVWQNRDVYLQGPIWAKIPHTDGNCHPSPLMGGFGLKHPPPQILIKNTPVPADPPTTFSQAKLASFITQYSTGQVSVEIEWELQKENSKRWNPEIQYTSNYYKSTNVDFAVNTEGTYSEPRPIGTRYLTRNL

SEQ ID NO: 275 - protein, 738 aa, Adeno-associated virus
MAADGYLPDWLEDNLSEGIREWWDLKPGAPKPKANQQKQDDGRGLVLPGYKYLGPFNGLDKGEPVNAADAAALEHDKAYDQQLKAGDNPYLRYNHADAEFQERLQEDTSFGGNLGRAVFQAKKRVLEPLGLVEEGAKTAPGKKRPVEPSPQRSPDSSTGIGKKGQQPARKRLNFGRTGDSESVPDPQPIGEPPAAPSSVGSGTMAAGGGAPMADNNEGADGVGSSSGNWHCDSTWLGDRVITTSTRTWALPTYNNHLYKQISNGTSGGSTNDNTYFGYSTPWGYLDFNRFHCHFSPRDWQRLINNNWGFRPKRLSFKLFNIQVKEVTQNEGTKTIANNLASTIQVFTDSEYQPPYVLGSAHQGCLPPFPADVFMIPQYGYLTLNNGSQAVGRSSFYCLEYFPSQMLRTGNNFSFSYTFEDVPFHSSYAHSQSLDRLMNPLIDQYLYYLSRTQSTGGTAGTQQLLFSRAGPSNMSAQARNWLPGPCYRQQRVSTTLSQNNNSNFAWTGATKYHLNGRDSLVNPGVAMATNKDDEDRFFPSSGILMFGKQGAGKDNVDYSNVMLTSEEEIKTTNPVATEQYGVVADNLQQQNTAPTVGAVNSQGALPGMVWQNRDVYLQGPIWAKIPHTDGNFHPSPLMGGFGLKHPPPQILIKNTPVPADPPTAFNQAKLNSFIAQYSTGQVSVEIEWELQKENSKRWNPEIQYTSNYYKSTNADFAVNTEGVYSEPRPIGTRYLTRNL

SEQ ID NO: 276 - DNA, 2217 bp, Adeno-associated virus
atggctgccgatggttatcttccagattggctcgaggacaacctctctgagggcattcgcgagtggtgggacctgaaacctggagccccgaaacccaaagccaaccagcaaaagcaggacgacggccggggtctggtgcttcctggctacaagtacctcggacccttcaacggactcgacaagggggagcccgtcaacgcggcggacgcagcggccctcgagcacgacaaggcctacgaccagcagctcaaagcgggtgacaatccgtacctgcggtataatcacgccgacgccgagtttcaggagcgtctgcaagaagatacgtcttttgggggcaacctcgggcgagcagtcttccaggccaagaagcgggttctcgaacctctcggtctggttgaggaaggcgctaagacggctcctggaaagaagagaccggtagagccgtcaccacagcgttcccccgactcctccacgggcatcggcaagaaaggccagcagcccgccagaaagagactcaatttcggtcggactggcgactcagagtcagtccccgaccctcaacctatcggagaacctccagcagcgccctctagtgtgggatctggtacaatggctgcaggcggtggcgcaccaatggcagacaataacgaaggtgccgacggagtgggtagttcctcgggaaattggcattgcgattccacatggctgggcgacagagttatcaccaccagcacccgaacctgggccctgcccacctacaacaaccacctctacaagcaaatctccaacgggacctcgggaggcagcaccaacgacaacacctactttggctacagcaccccctgggggtatcttgactttaacagattccactgccacttctcaccacgtgactggcagcgactcatcaacaacaactggggattccggcccaagagactcagcttcaagctcttcaacatccaggtcaaagaggtcacgcagaatgaaggcaccaagaccatcgccaataacctcgccagcaccatccaggtgtttacggactcggaataccagccgccgtacgtcctcggctctgcccaccagggctgcctgcctccgttcccggcggacgtcttcatgattcctcagtacggctacctgactctcaacaacggtagtcaggccgtgggacgttcctccttctactgcctggagtacttcccctctcagatgctgagaacgggcaacaacttttccttcagctacactttcgaggacgtgcctttccacagcagctacgcgcacagccagagtttggacaggctgatgaatcctctcatcgaccagtacctgtactacctgtcaagaacccagtctacgggaggcacagcgggaacccagcagttgctgttttctcgggccgggcctagcaacatgtcggctcaggccagaaactggctgcctggaccctgctacagacagcagcgcgtctccacgacactgtcgcaaaacaacaacagcaactttgcctggactggtgccaccaagtatcatctgaacggcagagactctctggtgaatccgggcgtcgccatggcaaccaacaaggacgacgaggaccgcttcttcccatccagcggcatcctcatgtttggcaagcagggagctggaaaagacaacgtggactatagcaacgtgatgctaaccagcgaggaagaaatcaagaccaccaaccccgtggccacagaacagtatggcgtggtggctgataacctacagcagcaaaacaccgctcctactgtgggggccgtcaacagccagggagccttacctggcatggtctggcagaaccgggacgtgtacctgcagggtcctatttgggccaagattcctcacacagatggcaactttcacccgtctcctttaatgggcggctttggacttaaacatccgcctcctcagatcctcatcaaaaacactcctgttcctgcggatcctccaacagcgttcaaccaggccaagctgaattctttcatcgcgcagtacagcaccggacaagtcagcgtggagatcgagtgggagctgcagaaggagaacagcaagcgctggaacccagagattcagtatacttccaactactacaaatctacaaatgcggactttgctgttaatactgagggtgtttactctgagcctcgccccattggcactcgttacctcacccgtaatctgtaa

SEQ ID NO: 277 - DNA, 2208 bp, Adeno-associated virus
atggctgccgatggttatcttccagattggctcgaggacactctctctgaaggaataagacagtggtggaagctcaaacctggcccaccaccaccaaagcccgcagagcggcataaggacgacagcaggggtcttgtgcttcctgggtacaagtacctcggacccttcaacggactcgacaagggggagccggtcaacgaggcagacgccgcggccctcgagcacgacaaggcctacgaccggcagctcgacagcggagacaacccgtacctcaagtacaaccacgccgacgcagagtttcaggagcgccttaaagaagatacgtcttttgggggcaacctcggacgagcagtcttccaggcgaaaaagagggttcttgaacctctgggcctggttgaggagcctgttaagacggctccgggaaaaaagaggccggtagagcactctcctgtggagccagactcctcctcgggaaccggaaaagcgggccagcagcctgcaagaaaaagattaaattttggtcagactggagacgcagactccgtacctgacccccagcctctcggacagccaccagcagccccctctggtctgggatctactacaatggctacaggcagtggcgcaccaatggcagacaataacgagggtgccgatggagtgggtaattcctcaggaaattggcattgcgattcccaatggctgggcgacagagtcatcaccaccagcacccgaacctgggccctgcccacatacaacaaccacctctacaagcaaatctccagccaatcaggagccagcaacgacaaccactactttggctacagcaccccctgggggtattttgacttcaacagattccactgccacttttcaccacgtgactggcaaagactcgtcaacaacaaccggggattccggcccaaaagactcaacttcaagctctttaatattcaagtcaaagaggtcacgcagaatgacggtacgacgacgattgccaataaccttaccagcacggttcaggtgtttactgactcggagtaccagctcccgtacgtcctgggctcggcgcatcaaggatgcctcccgccgtttccagcggacgtcttcatggtcccacagtatggatacctcaccctgaacaacgggagtcaggcggtaggacgctcttccttttactgcctggagtactttccttctcagatgctgcgtactggaaacaactttcagttcagctacacttttgaagacgtgcctttccacagcagctacgctcacagccagagtctggatcggctgatgaatcctctgatcgaccagtacctgtattatctgaacaagacacaaacaaatagtggaactcttcagcagtctcggctactgtttagccaagctggaccaaccaacatgtctcttcaagctaaaaactggctgcctggaccttgctacagacagcagcgtctgtcaaaacaggcaaacgacaacaacaacagcaactttccctggactgcagctacaaagtatcatctaaatggccgggactcgttggttaatccaggaccagctatggccagtcacaaggatgacgaagaaaagtttttccccatgcatggaaccctgatatttggtaaacaaggaacaaatgccaacgacgcggatttggaaaatgtcatgattacagatgaagaagaaatcagggccaccaatcccgtggctacggagcagtacgggactgtgtcaaataatttgcaaaactcaaacactggtccaactactggaactgtcaatcaccaaggagcgttacctggtatggtgtggcaggatcgagacgtgtacctgcagggacccatttgggccaagattcctcacaccgatggacactttcatccttctccactgatgggaggttttggactcaaacacccgcctcctcagatcatgatcaaaaacactcccgttccagccaatcctcccacaaacttcagttctgccaagtttgcttctttcatcacacagtattccacgggacaggtcagcgtggagatcgagtgggagctgcagaaggagaacagcaaacgctggaatcccgaaattcagtacacttccaactacaacaagtctgttaatgtggactttactgtggacactaatggtgtgtattcagagcctcgccccattggcaccagatacctgactcgtaatctgtaa

SEQ ID NO: 278 - protein, 735 aa, Adeno-associated virus
MAADGYLPDWLEDTLSEGIRQWWKLKPGPPPPKPAERHKDDSRGLVLPGYKYLGPFNGLDKGEPVNEADAAALEHDKAYDRQLDSGDNPYLKYNHADAEFQERLKEDTSFGGNLGRAVFQAKKRVLEPLGLVEEPVKTAPGKKRPVEHSPVEPDSSSGTGKAGQQPARKRLNFGQTGDADSVPDPQPLGQPPAAPSGLGSTTMATGSGAPMADNNEGADGVGNSSGNWHCDSQWLGDRVITTSTRTWALPTYNNHLYKQISSQSGASNDNHYFGYSTPWGYFDFNRFHCHFSPRDWQRLVNNNRGFRPKRLNFKLFNIQVKEVTQNDGTTTIANNLTSTVQVFTDSEYQLPYVLGSAHQGCLPPFPADVFMVPQYGYLTLNNGSQAVGRSSFYCLEYFPSQMLRTGNNFQFSYTFEDVPFHSSYAHSQSLDRLMNPLIDQYLYYLNKTQTNSGTLQQSRLLFSQAGPTNMSLQAKNWLPGPCYRQQRLSKQANDNNNSNFPWTAATKYHLNGRDSLVNPGPAMASHKDDEEKFFPMHGTLIFGKQGTNANDADLENVMITDEEEIRATNPVATEQYGTVSNNLQNSNTGPTTGTVNHQGALPGMVWQDRDVYLQGPIWAKIPHTDGHFHPSPLMGGFGLKHPPPQIMIKNTPVPANPPTNFSSAKFASFITQYSTGQVSVEIEWELQKENSKRWNPEIQYTSNYNKSVNVDFTVDTNGVYSEPRPIGTRYLTRNL

SEQ ID NO: 279 - protein, 738 aa, Adeno-associated virus
MAADGYLPDWLEDNLSEGIREWWDLKPGAPKPKANQQKQDDGRGLVLPGYKYLGPFNGLDKGEPVNAADAAALEHDKAYDQQLKAGDNPYLRYNHADAEFQERLQEDTSFGGNLGRAVFQAKKRVLEPLGLVEEAAKTAPGKKRPVEPSPQRSPDSSTGIGKKGQQPAKKRLSFGQTGDSESVPDPQPIGEPPAGPSGLGSGTMAAGGGAPMADNNEGADGVGSSSGNWHCDSTWLGDRVITTSTRTWALPTYNNHLYKQISNGTSGGSTNDNTYFGYSTPWGYFDFNRFHCHFSPRDWQRLINNNWGFRPKRLSFKLFNIQVKEVTQNEGTKTIANNLTSTIQVFTDSEYQLPYVLGSAHQGCLPPFPADVFMIPQYGYLTLNNGSQAVGRSSFYCLEYFPSQMLRTGNNSEFSYTFEDVPFHSSYAHSQSLDRLMNPLIDQYLYYLSRTQSTGGTQGTQQLLFSQAGPANMSAQAKNWLPGPCYRQQRVSTTLSQNNNSNFAWTGATKYHLNGRDSLVNPGVAMATHKDDEERFFPSSGVLMFGKQGAGRDNVDYSSVMLTSEEEIKTTNPVATEQYGVVADNLQQTNTGPIVGNVNSQGALPGMVWQNRDVYLQGPIWAKIPHTDGNFHPSPLMGGFGLKHPPPQILIKNTPVPADPPTTFSQAKLASFITQYSTGQVSVEIEWELQKENSKRWNPEIQYTSNYYKSTNVDFAVNTEGTYSEPRPIGTRYLTRNL

SEQ ID NO: 280 - DNA, 2217 bp, Adeno-associated virus
atggctgctgacggttatcttccagattggctcgaggacaacctctctgagggcattcgcgagtggtgggacctgaaacctggagcccccaagcccaaggccaaccagcagaagcaggacgacggccggggtctggtgcttcctggctacaagtacctcggacccttcaacggactcgacaagggggagcccgtcaacgcggcggacgcagcggccctcgagcacgacaaggcctacgaccagcagctcaaagcgggtgacaatccgtacctgcggtataaccacgccgacgccgagtttcaggagcgtctgcaagaagatacgtcttttgggggcaacctcgggcgagcagtcttccaggccaagaagcgggttctcgaacctctcggtctggttgaggaagctgctaagacggctcctggaaagaagagaccggtagaaccgtcacctcagcgttcccccgactcctccacgggcatcggcaagaaaggccagcagcccgctaaaaagagactgagctttggtcagactggcgactcagagtcagtccccgaccctcaaccaatcggagaaccaccagcaggcccctctggtctgggatctggtacaatggctgcaggcggtggcgctccaatggcagacaataacgaaggcgccgacggagtgggtagttcctcaggaaattggcattgcgattccacatggctgggcgacagagtcatcaccaccagcacccgaacctgggccctgcccacctacaacaaccacctctacaagcaaatatccaatgggacatcgggaggaagcaccaacgacaacacctacttcggctacagcaccccctgggggtattttgacttcaacagattccactgccacttctcaccacgtgactggcagcgactcatcaacaacaactggggattccggccaaaaagactcagcttcaagctcttcaacatccaggtcaaggaggtcacgcagaatgaaggcaccaagaccatcgccaataaccttaccagcacgattcaggtatttacggactcggaataccagctgccgtacgtcctcggctccgcgcaccagggctgcctgcctccgttcccggcggacgtcttcatgattccccagtacggctaccttacactgaacaatggaagtcaagccgtaggccgttcctccttctactgcctggaatattttccatctcaaatgctgcgaactggaaacaattctgaattcagctacaccttcgaggacgtgcctttccacagcagctacgcacacagccagagcttggaccgactgatgaatcctctcatcgaccagtacctgtactacttatccagaactcagtccacaggaggaactcaaggtacccagcaattgttattttctcaagctgggcctgcaaacatgtcggctcaggctaagaactggctacctggaccttgctaccggcagcagcgagtctctacgacactgtcgcaaaacaacaacagcaactttgcttggactggtgccaccaaatatcacctgaacggaagagactctttggtaaatcccggtgtcgccatggcaacccacaaggacgacgaggaacgcttcttcccgtcgagtggagtcctgatgtttggaaaacagggtgctggaagagacaatgtggactacagcagcgttatgctaaccagcgaagaagaaattaaaaccactaaccctgtagccacagaacaatacggtgtggtggctgacaacttgcagcaaaccaatacagggcctattgtgggaaatgtcaacagccaaggagccttacctggcatggtctggcagaaccgagacgtgtacctgcagggtcccatctgggccaagattcctcacacggacggcaacttccacccttcaccgctaatgggaggatttggactgaagcacccacctcctcagatcctgatcaagaacacgccggtacctgcggatcctccaacaacgttcagccaggcgaaattggcttccttcattacgcagtacagcaccggacaggtcagcgtggaaatcgagtgggagctgcagaaggagaacagcaaacgctggaacccagagattcagtacacttcaaactactacaaatctacaaatgtggactttgctgtcaatacagagggaacttattctgagcctcgccccattggtactcgttacctcacccgtaatctgtaa

SEQ ID NO: 281 - protein, 738 aa, Adeno-associated virus
MAADGYLPDWLEDNLSEGIREWWDLKPGAPKPKANQQKQDDGRGLVLPGYKYLGPFNGLDKGEPVNAADAAALEHDKAYDQQLKAGDNPYLRYNHADAEFQERLQEDTSFGGNLGRAVFQAKKRVLEPLGPVEEAAKTAPGKKRPVEPPPQRSPDSSTGIGKKGQQPAKKRLNFGQTGDSESVPDPQPIGEPPAGPSGLGSGTMAAGGGAPMADNNEGADGVGSSSGNWHCDSTWLGDRVITTSTRTWALPTYNNHLYKQISNGTSGGSTNDNTYFGYSTPWGYFDFNRFHCHFSPRDWQRLINNNWGFRPKRLSFKLFNIQVKEVTQNEGTKTVANNLTSTIQVFTDSEYQLPYVLGSAHQGCLPPFPADVFMIPQYGYLTLNNGSQAVGRSSFYCLEYFPSQMLRTGNNFEFSYTFEDVPFHSSYAHSQSLDRLMNPLIDQYLYYLSRTQSTGGTQGTQQLLFSQAGPANMSAQAKNWLPGPCYRQQRVSTTLSQNNNSNFAWTGATKYHLNGRDSLVNPGVAMATHKDDEERFFPSSGVLMFGKQGAGRDNVDYSSVMLTSEEEIKTTNPVATEQYGVVADNLQQTNTGPIVGNVNSQGALPGMVWQNRDVYLQGPIWAKIPHTDGNFHPSPLMGGFGLKHPPPQILIKNTPVPADPPTTFSQAKLASFITQYSTGQVSVEIEWELQKENSKRWNPEIQYTSNYYKSTNVDFAVNTEGTYSEPRPIGTRYLTRNL

SEQ ID NO: 282 - DNA, 2217 bp, Adeno-associated virus
atggctgctgacggttatcttccagattggctcgaggacaacctctctgagggcattcgcgagtggtgggacctgaaacctggagcccccaagcccaaggccaaccagcagaagcaggacgacggccggggtctggtgcttcctggctacaagtacctcggacccttcaacggactcgacaagggggagcccgtcaacgcggcggacgcagcggccctcgagcacgacaaggcctacgaccagcagctcaaagcgggtgacaatccgtacctgcggtataaccacgccgacgccgagtttcaggagcgtctacaagaagatacgtcttttgggggcaacctcgggcgagcagtcttccaggccaagaagcgggttctcgaacctctcggtccggttgaggaagctgctaagacggctcctggaaagaagagaccggtagaaccgccacctcagcgttcccccgactcctccacgggcatcggcaagaaaggccagcagcccgctaaaaagagactgaactttggtcagactggcgactcagagtcagtccccgaccctcaaccaatcggagaaccaccagcaggcccctctggtctgggatctggtacaatggctgcaggcggtggcgctccaatggcagacaataacgaaggcgccgacggagtgggtagttcctcaggaaattggcattgcgattccacatggctgggcgacagagtcatcaccaccagcacccgaacctgggccctgcccacctacaacaaccacctctacaagcaaatatccaatgggacatcgggaggaagcaccaacgacaacacctacttcggctacagcaccccctgggggtattttgacttcaacagattccactgccacttctcaccacgtgactggcagcgactcatcaacaacaactggggattccggccaaaaagactcagcttcaagctcttcaacatccaggtcaaggaggtcacgcagaatgaaggcaccaagaccgtcgccaataaccttaccagcacgattcaggtatttacggactcggaataccagctgccgtacgtcctcggctccgcgcaccagggctgcctgcctccgttcccggcggacgtcttcatgattccccagtacggctaccttacactgaacaatggaagtcaagccgtaggccgttcctccttctactgcctggaatattttccatctcaaatgctgcgaactggaaacaattttgaattcagctacaccttcgaggacgtgcctttccacagcagctacgcacacagccagagcttggaccgactgatgaatcctctcatcgaccagtacctgtactacttatccagaactcagtccacaggaggaactcaaggtacccagcaattgttattttctcaagctgggcctgcaaacatgtcggctcaggctaagaactggctacctggaccttgctaccggcagcagcgagtctctacgacactgtcgcaaaacaacaacagcaactttgcttggactggtgccaccaaatatcacctgaacggaagagactctttggtaaatcccggtgtcgccatggcaacccacaaggacgacgaggaacgcttcttcccgtcgagtggagtcctgatgtttggaaaacagggtgctggaagagacaatgtggactacagcagcgttatgctaaccagcgaagaagaaattaaaaccactaaccctgtagccacagaacaatacggtgtggtggctgacaacttgcagcaaaccaatacagggcctattgtgggaaatgtcaacagccaaggagccttacctggcatggtctggcagaaccgagacgtgtacctgcagggtcccatctgggccaagattcctcacacggacggcaacttccacccttcaccgctaatgggaggatttggactgaagcacccacctcctcagatcctgatcaagaacacgccggtacctgcggatcctccaacaacgttcagccaggcgaaattggcttccttcattacgcagtacagcaccggacaggtcagcgtggaaatcgagtgggagctgcagaaggagaacagcaaacgttggaacccagagattcagtacacttcaaactactacaaatctacaaatgtggactttgctgtcaatacagagggaacttattctgagcctcgccccattggtactcgttacctcacccgtaatctgtaa

SEQ ID NO: 283 - protein, 738 aa, Adeno-associated virus
MAADGYLPDWLEDNLSEGIREWWDLKPGAPKPKANQQKQDDGRGLVLPGYKYLGPFNGLDKGEPVNAADAAALEHDKAYDQQLKAGDNPYLRYNHADAEFQERLQEDTSFGGNLGRAVFQAKKRVLEPLGLVEEAAKTAPGKKRPVEPSPQRSPDSSTGIGKKGQQPAKKRLNFGQTGDSESVPDPQPIGEPPAGPSGLGSGTMAAGGGAPMADNNEGADGVGSSSGNWHCDSTWLGDRVITTSTRTWALPTYNNHLYKQISNGTSGGSTNDNTYFGYSTPWGYFDFNRFHCHFSPRDWQRLINNNWGFRPKRLSFKLFNIQVKEVTQNEGTKTIANNLTSTIQVFTDSEYQLPYVLGSAHQGCLPPFPADVFMIPQYGYLTLNNGSQAVGRSSFYCLEYFPSQMLRTGNNFEFSYTFEDVPFHSSYAHSQSLDRLMNPLIDQYLYYLSRTQSTGGTQGTQQLLFSQAGPANMSAQAKNWLPGPCYRQQRVSTTLSQSNNSNFAWTGATKYHLNGRDSLVNPGVAMATHKDDEERFFPSSGVLMFGKQGAGRDNVDYSSVMLTSEEEIKTTNPVATEQYGVVADNLQQTNTGPIVGNVNSQGALPGMVWQNRDVYLQGPIWAKIPHTDGNFHPSPLMGGLGLKHPPPQILIKNTPVPADPPTTFSQAKLASFITQYSTGQVSVEIEWELQKENSKRWNPEIQYTSNYYKSTNVDFAVNTEGTYSEPRPIGTRYLTRNL

SEQ ID NO: 284 - DNA, 2217 bp, Adeno-associated virus
atggctgctgacggttatcttccagattggctcgaggacaacctctctgagggcattcgcgagtggtgggacctgaaacctggagcccccaagcccaaggccaaccagcagaagcaggacgacggccggggtctggtgcttcctggctacaagtacctcggacccttcaacggactcgacaagggggagcccgtcaacgcggcggacgcagcggccctcgagcacgacaaggcctacgaccagcagctcaaagcgggtgacaatccgtacctgcggtataaccacgccgacgccgagtttcaggagcgtctgcaagaagatacgtcttttgggggcaacctcgggcgagcagtcttccaggccaagaagcgggttctcgaacctctcggtctggttgaggaagcggctaagacggctcctggaaagaagagaccggtagaaccgtcacctcagcgttcccccgactcctccacgggcatcggcaagaaaggccagcagcccgctaaaaagagactgaactttggtcagactggcgactcagagtcagtccccgaccctcaaccaatcggagaaccaccagcaggcccctctggtctgggatctggtacaatggctgcaggcggtggcgctccaatggcagacaataacgaaggcgccgacggagtgggtagttcctcaggaaattggcattgcgattccacatggctgggcgacagagtcatcaccaccagcacccgaacctgggccctgcccacctacaacaaccacctctacaagcaaatatccaatgggacatcgggaggaagcaccaacgacaacacctacttcggctacagcaccccctgggggtattttgacttcaacagattccactgccacttctcaccacgtgactggcagcgactcatcaacaacaactggggattccggccaaaaagactcagcttcaagctcttcaacatccaggtcaaggaggtcacgcagaatgaaggcaccaagaccatcgccaataaccttaccagcacgattcaggtatttacggactcggaataccagctgccgtacgtcctcggctccgcgcaccagggctgcctgcctccgttcccggcggacgtcttcatgattccccagtacggctaccttacactgaacaatggaagtcaagccgtaggccgttcctccttctactgcctggaatattttccatctcaaatgctgcgaactggaaacaattttgaattcagctacaccttcgaggacgtgcctttccacagcagctacgcacacagccagagcttggaccgactgatgaatcctctcatcgaccagtacctgtactacttatccagaactcagtccacaggaggaactcaaggtacccagcaattgttattttctcaagctgggcctgcaaacatgtcggctcaggctaagaactggctacctggaccttgctaccggcagcagcgagtctctacgacactgtcgcaaagcaacaacagcaactttgcttggactggtgccaccaaatatcacctgaacggaagagactctttggtaaatcccggtgtcgccatggcaacccacaaggacgacgaggaacgcttcttcccgtcgagtggagtcctgatgtttggaaaacagggtgctggaagagacaatgtggactacagcagcgttatgctaaccagcgaagaagaaattaaaaccactaaccctgtagccacagaacaatacggtgtggtggctgacaacttgcagcaaaccaatacagggcctattgtgggaaatgtcaacagccaaggagccttacctggcatggtctggcagaaccgagacgtgtacctgcagggtcccatctgggccaagattcctcacacggacggcaacttccacccttcaccgctaatgggaggacttggactgaagcacccacctcctcagatcctgatcaagaacacgccggtacctgcggatcctccaacaacgttcagccaggcgaaattggcttccttcattacgcagtacagcaccggacaggtcagcgtggaaatcgagtgggagctgcagaaggagaacagcaaacgctggaacccagagattcagtacacttcaaactactacaaatctacaaatgtggactttgctgtcaatacagagggaacttattctgagcctcgccccattggtactcgttacctcacccgtaatctgtaa

SEQ ID NO: 285 - protein, 737 aa, Adeno-associated virus
MAADGYLPDWLEDNLSEGIREWWDLKPGAPKPKANQQKQDDGRGLVLPGYKYLGPFNGLDKGEPVNAADAAALEHDKAYDQQLKAGDNPYPRYNHADAEFQERLQEDTPFGGNLGRAVFQAKKRVLEPLGLVEEAAKTAPGKKRPVEPSPQRSPDSSTGIGKKGQQPAKKRLNFGQTGDSESVPDPQPIGEPPAGPSGLGSGTMAAGGGAPMADNNEGADGVGNASGNWHCDSTWLGDRVITTSTRTWALPTYNNHLYKQISSASTGASNDNHYFGYSTPWGYFDFNRFHCHFSPRDWQRLINNNWGFRPKRLNFKLFNIQVKEVTTNDGVTTIANNLTSTVQVFSDSEYQLPYVLGSAHQGCLPPFPADVFMIPQYGYLTLNNGSQAVGRSSFYCLEYFPSQMLRTGNNFTFSYTFEEVPLHSSYAHSQSLDRLMNPLIVQYLYYLNRTQNQSGSAQNKDLLFSRGSPAGMSVQPKNWLPGPCYRQQRVSKTKTDNNNSNFTWTGASKYNLNGRESIINPGTAMASHKDDEDKFFPMSGVMIFGKESAGASNTALDNVMITDEEEIKATNPVATERFGTVAVNFQSSSTDPATGDVHAMGALPGMVWQDRDVYLQGPIWAKIPHTDGHFHPSPLMGGFGLKNPPPQILIKNTPVPANPPAEFSATKFASFITQYSTGQVSVEIEWELQKENSKRWNPEVQYTSNYAKSASVDFTVDNNGLYTEPRPIGTRYLTRPL

SEQ ID NO: 286 - protein, 737 aa, Adeno-associated virus
MAADGYLPDWLEDNLSEGIREWWDLKPGAPKPKANQQKQDDGRGLVLPGYKYLGPFNGLDKGEPVNAADAAALEHDKAYDQQLKAGDNPYPRYNHADAEFQERLQEDTSFGGNLGRAVFQAKKRVLEPLGLVEEAAKTAPGKKRPVEPSPQRSPDSSTGIGKKGQQPAKKRLNFGQTGDSESVPDPQPIGEPPAGPSGLGSGTMAAGGGAPMADNNEGADGVGNASGNWHCDSTWLGDRVITTSTRTWALPTYNNHLYKQISSASTGASNDNHYFGYSTPWGYFDFNRFHCHFSPRDWQRLINNNWGFRPKRLNFKLFNIQVKEVTTNDGVTTIANNLTSTVQVFSDSEYQLPYVLGSAHQGCLPPFPADVFMIPQYGYLTLNNGSQAVGRSSFYCLEYFPSQMLRTGNNFTFSYTFEEVPLHSSYAHSQSLDRLMNPLIDQYLYYLNRTQNQSGSAQNKDLLFSRGSPAGMSVQPKNWLPGPCYRQQRVSKTKTDNNNSNFTWTGASKYNLNGRESIINPGTAMASHKDDEDKFFPMSGVMIFGKESAGASNTALDNVMITDEEEIKATNPVATERFGTVAVNFQSSSTDPATGDVHAMGALPGMVWQDRDVYLQGPIWAKIPHTDGHFHPSPLMGGFGLKNPPPQILIKNTPVPANPPAEFSATKFASFITQYSTGQVSVEIEWELQKENSKRWNPEVQYTSNYAKSASVDFTVDNNGLYTEPRPIGTRYLTRPL

SEQ ID NO: 287 - DNA, 2214 bp, Adeno-associated virus
atggctgctgacggttatcttccagattggctcgaggacaacctctctgagggcattcgcgagtggtgggacctgaaacctggagcccccaagcccaaggccaaccagcagaagcaggacgacggccggggtctggtgcttcctggctacaagtacctcggacccttcaacggactcgacaagggggagcccgtcaacgcggcggacgcagcggccctcgagcacgacaaggcctacgaccagcagctcaaagcgggtgacaatccgtacccgcggtataaccacgccgacgccgagtttcaggagcgtctgcaagaagatacgccttttgggggcaacctcgggcgagcagtcttccaggccaagaagcgggttctcgaacctctcggtctggttgaggaagctgctaagacggctcctggaaagaagagaccggtagaaccgtcacctcagcgttcccccgactcctccacgggcatcggcaagaaaggccagcagcccgctaaaaagagactgaactttggtcagactggcgactcagagtcagtccccgaccctcaaccaatcggagaaccaccagcaggcccctctggtctgggatctggtacaatggctgcaggcggtggcgctccaatggcagacaataacgaaggcgccgacggagtgggtaatgcctcaggaaattggcattgcgattccacatggctgggcgacagagtcatcaccaccagcacccgcacctgggccttgcccacctacaataaccacctctacaagcaaatctccagtgcttcaacgggggccagcaacgacaaccactacttcggctacagcaccccctgggggtattttgatttcaacagattccactgccacttttcaccacgtgactggcagcgactcatcaacaacaattggggattccggcccaagagactcaacttcaaactcttcaacatccaagtcaaggaggtcacgacgaatgatggcgtcacaaccatcgctaataaccttaccagcacggttcaagtcttctcggactcggagtaccagcttccgtacgtcctcggctctgcgcaccagggctgcctccctccgttcccggcggacgtgttcatgattccgcaatacggctacctgacgctcaacaatggcagccaagccgtgggacgttcatccttttactgcctggaatatttcccttctcagatgctgagaacgggcaacaactttaccttcagctacacctttgaggaagtgcctctccacagcagctacgcgcacagccagagcctggaccggctgatgaatcctctcatcgtccaatacctgtattacctgaacagaactcaaaatcagtccggaagtgcccaaaacaaggacttgctgttcagccgtgggtctccagctggcatgtctgttcagcccaaaaactggctacctggaccctgttatcggcagcagcgcgtttctaaaacaaaaacagacaacaacaacagcaattttacctggactggtgcttcaaaatataacctcaatgggcgtgaatccatcatcaaccctggcactgctatggcctcacacaaagacgacgaagacaagttctttcccatgagcggtgtcatgatttttggaaaagagagcgccggagcttcaaacactgcattggacaatgtcatgattacagacgaagaggaaattaaagccactaaccctgtggccaccgaaagatttgggaccgtggcagtcaatttccagagcagcagcacagaccctgcgaccggagatgtgcatgctatgggagcattacctggcatggtgtggcaagatagagacgtgtacctgcagggtcccatttgggccaaaattcctcacacagatggacactttcacccgtctcctcttatgggcggctttggactcaagaacccgcctcctcagatcctcatcaaaaacacgcctgttcctgcgaatcctccggcggagttttcagctacaaagtttgcttcattcatcacccaatactccacaggacaagtgagtgtggaaattgaatgggagctgcagaaagaaaacagcaagcgctggaatcccgaagtgcagtacacatccaattatgcaaaatctgccagcgttgattttactgtggacaacaatggactttatactgagcctcgccccattggcacccgttaccttacccgtcccctgtaa

SEQ ID NO: 288 - protein, 736 aa, Adeno-associated virus
MAADGYLPDWLEDTLSEGIRQWWKLRPGPPPPKPAERHKDDSRGLVLPGYKYLGPFNGLDKGEPVNEADAAALEHDKAYDRQLDSGDNPYLKYNHADAEFQERLKEDTSFGGNLGRAVFQAKKRVLEPLGLVEEGAETAPGKKRPVEQSPQGPDSSSGIGKTGQQPAKKRLNFGQTGDSESVPDPQPLGEPPATPAAVGPTTMASGGGAPMADNNEGADGVGNASGNWHCDSTWLGDRVITTSTRTWALPTYNNHLYKQISSASTGASNDNHYFGYSTPWGYFDFNRFHCHFSPRDWQRLINNNWGFRPKRLNFKLFNIQVKEVTTNDGVTTIANNLTSTVQVFSDSEYQLPYVLGSAHQGCLPPFPADVFMIPQYGYLTLNNGSQAVGRSSFYCLEYFPSQMLRTGNNFTFSYTFEEVPFHSSYAHSQSLDRLMNPLIDQYLYYPNRTQNQSGSAQNKDLLFSRGSPAGMSVQPKNWLPGPCYRQQRVSKTKTDNNNSNFTWTGASKYNLNGRESIINPGTAMASHKDDEDKFFPMSGVMIFGKESAGASNTALDNVMITDEEEIKATNPVATERFGTVAVNFQSSSTDPATGDVHAMGALPGMVWQGRDVYLQGPIWAKIPHTDGHFHPSPLMGGFGLKNPPPQILIKNTPVPANPPAEFSATKFASFITQYSTGQVSVEIEWELQKENSKRWNPEVQYTSNYAKSANVDFTVDNNGLYTEPRPIGTRYLTRPL

SEQ ID NO: 289 - DNA, 2211 bp, Adeno-associated virus
atggctgccgatggttatcttccagattggctcgaggacactctctctgaaggaataagacagtggtggaagctcagacctggcccaccaccaccaaagcccgcagagcggcataaggacgacagcaggggtcttgtgcttcctgggtacaagtacctcggacccttcaacggactcgacaagggagagccggtcaacgaggcagacgccgcggccctcgagcacgacaaagcctacgaccggcagctcgacagcggagacaacccgtacctcaagtacaaccacgccgacgcggagtttcaggagcgccttaaagaagatacgtcttttgggggcaacctcgggcgagcagtcttccaggccaagaagcgggttctcgaacctctcggtctggttgaggaaggcgctgagacggctcctggaaagaaacgtccggtagagcagtcgccacaagggccagactcctcctcgggcatcggcaagacaggccagcagcccgctaaaaagagactcaattttggtcagactggcgactcagagtcagtccccgatccacaacctctcggagaacctccagcaacccccgctgctgtgggacctactacaatggcttcaggcggtggcgcaccaatggcagacaataacgaaggcgccgacggagtgggtaatgcctcaggaaattggcattgcgattccacatggctgggcgacagagtcatcaccaccagcacccgcacctgggccttgcccacctacaataaccacctctacaagcaaatctccagtgcttcaacgggggccagcaacgacaaccactacttcggctacagcaccccctgggggtattttgatttcaacagattccactgccacttttcaccacgtgactggcagcgactcatcaacaacaattggggattccggcccaagagactcaacttcaaactcttcaacatccaagtcaaggaggtcacgacgaatgatggcgtcacaaccatcgctaataaccttaccagcacggttcaagtcttctcggactcggagtaccagcttccgtacgtcctcggctctgcgcaccagggctgcctccctccgttcccggcggacgtgttcatgattccgcaatacggctacctgacgctcaacaatggcagccaagccgtgggacgttcatccttttactgcctggaatatttcccttctcagatgctgagaacgggcaacaactttaccttcagctacacctttgaggaagtgcctttccacagcagctacgcgcacagccagagcctggaccggctgatgaatcctctcatcgaccaatacctgtattacccgaacagaactcaaaatcagtccggaagtgcccaaaacaaggacttgctgtttagccgtgggtctccagctggcatgtctgttcagcccaaaaactggctacctggaccctgttatcggcagcagcgcgtttctaaaacaaaaacagacaacaacaacagcaattttacctggactggtgcttcaaaatataacctcaatgggcgtgaatccatcatcaaccctggcactgctatggcctcacacaaagacgacgaagacaagttctttcccatgagcggtgtcatgatttttggaaaagagagcgccggagcttcaaacactgcattggacaatgtcatgattacagacgaagaggaaattaaagccactaaccctgtggccaccgaaagatttgggaccgtggcagtcaatttccagagcagcagcacagaccctgcgaccggagatgtgcatgctatgggagcattacctggcatggtgtggcaaggtagagacgtgtacctgcagggtcccatttgggccaaaattcctcacacagatggacactttcacccgtctcctcttatgggcggctttggactcaagaacccgcctcctcagatcctcatcaaaaacacgcctgttcctgcgaatcctccggcggagttttcagctacaaagtttgcttcattcatcacccaatactccacaggacaagtgagtgtggaaattgaatgggagctgcagaaagaaaacagcaagcgctggaatcccgaagtgcagtacacatccaattatgcaaaatctgccaacgttgattttactgtggacaacaatggactttatactgagcctcgccccattggcacccgttaccttacccgtcccctgtaa

SEQ ID NO: 290 - protein, 736 aa, Adeno-associated virus
MAADGYLPDWLEDTLSEGIRQWWKLRPGPPPPKPAERHKDDSRGLVLPGYKYLGPFNGLDKGEPVNEADAAALEHDKAYDRQLDSGDNPYLKYNHADAEFQERLKEDTSFGGNLGRAVFQAKKRVLEPLGLVEEGAKTAPGKKRPVEQSPQGPDSSSGIGKTGQQPAKKRLNFGQTGDSESVPDPQPLGEPPATPAAVGPTTMASGGGAPMADNNEGADGVGNASGNWHCDSTWLGDRVITTSTRTWALPTYNNHLYKQISSASTGASNDNHYFGYSTPWGYFDFNRFHCHFSPRDWQRLINNNWGFRPKRLNFKLFNIQVKEVTTNDGVTTIANNLTSTVQVFSDSEYQLPYVLGSAHQGCLPPFPADVFMIPQYGYLTLNNGSQAVGRSSFYCLEYFPSQMLRTGNNFTFSYTFEEVPFHSSYAHSQSLDRLMNPLIDQYLYYPNRTQNQSGSAQNKDLLFSRGSPAGMSVQPKNWLPGPCYRQQRVSKTKTDNNNSNFTWTGASKYNLNGRESIINPGTAMASHKDDEDKFFPMSGVMIFGKESAGASNTALDNVMITDEEEIKATNPVATERFGTVAVNFQSSSTDPATGDVHAMGALPGMVWQGRDVYLQGPIWAKIPHTDGHFHPSPLMGGFGLKNPPPQILIKNTPVPANPPAEFSATKFASFITQYSTGQVSVEIEWELQKENSKRWNPEVQYTSNYAKSANVDFTVDNNGLYTEPRPIGTRYLTRPL

SEQ ID NO: 291 - protein, 736 aa, Adeno-associated virus
MAADGYLPDWLEDTLSEGIRQWWKLRPGPPPPKPAERHKDDSRGLVLPGYKYLGPFNGLDKGEPVNEADAAALEHDKAYDRQLDSGDNPYLKYNHADAEFQERLKEDTSFGGNLGRAVFQAKKRVLEPLGLVEEGAKTAPGKKRPVEQSPQGPDSSSGIGKTGQQPAKKRLNFGQTGDSESVPDPQPLGEPPATPAAVGPTTMASGGGAPMADNNEGADGVGNASGNWHCDSTWLGDRVITTSTRTWALPTYNNHLYKQISSASTGASNDNHYFGYSTPWGYFDFNRFHCHFSPRDWQRLINNNWGFRPKRLNFKLFNIQVKEVTTNDGVTTIANNLTSTVQVFSDSEYQLPYVLGSAHQGCLPPFPADVFMIPQYGYLTLNNGSQAVGRSSFYCLEYFPSQMLRTGNNFTFSYTFEEVPFHSSYAHSQSLDRLMNPLIDQYLYYLNRTQNQSGSAQNKDLLFSRGSPAGMSVQPKNWLPGPCYRQQRVSKTKTDNNNSNFTWTGASKYNLNGRESIINPGTAMASHKDDEDKFFPMSGVMIFGKESAGASNTALDNVMITDEEEIKATNPVATERFGTVAVNFQSSSTDPATGDVHAMGALPGMVWQGRDVYLQGPIWAKIPHTDGHFHPSPLMGGFGLKNPPPQILIKNTPVPANPPAEFSATKFASFITQYSTGQVSVEIEWELQKENSKRWNPEVQYTSNYAKSANVDFTVDNNGLYTEPRPIGTRYLTRPL

SEQ ID NO: 292 - protein, 736 aa, Adeno-associated virus
MAADGYLPDWLEDTLSEGIRQWWKLRPGPPPPKPAERHKDDSRGLVLPGYKYLGPFNGLDKGEPVNEADAAALEHDKAYDRQLDSGDNPYLKYNHADAEFQERLKEDTSFGGNLGRAVFQAKKRVLEPLGLVEEGAKTAPGKKRPVEQSPQGPDSSSGIGKTGQQPAKKRLNFGQTGDSESVPDPQPLGEPPATPAAVGPTTMASGGGAPMADNNEGADGVGNASGNWHCDSTWLGDRVITTSTRTWALPTYNNHLYKQISSASTGASNDNHYFGYSTPWGYFDFNRFHCHFSPRDWQRLINNNWGFRPKRLNFKLFNIQVKEVTTNDGVTTIANNLTSTVQVFSDSEYQLPYVLGSAHQGCLPPFPADVFMIPQYGYLTLNNGSQAVGRSSFYCLEYFPSQMLRTGNNFTFSYTFEEVPFHSSYAHSQSLDRLMNPLIDQYLYYLNRTQNQSGSAQNKDLLFSRGSPAGMSVQPKNWLPGPCYRQQRVSKTKTDNNNSNFTWTGASKYNLNGRESIINPGTAMASHKDDEDKFFPMSGVMIFGKESAGASNTALDNVMITDEEEIKATNPVATERFGTVAVNFQSSSTDPATGDVHAMGALPGMVWQDRDVYLQGPIWAKIPHTDGHFHPSPLMGGFGLKNPPPQILIKNTPVPANPPAEFSATKFASFITQYSTGQVSVEIEWELQKENSKRWNPEVQYTSNYAKSANVDFTVDNNGLYTEPRPIGTRYLTRPL

SEQ ID NO: 293 - DNA, 2208 bp, Adeno-associated virus
atggctgccgatggctatcttccagattggctcgaggacactctctctgaaggaataagacagtggtggaagctcaaacctggcccaccaccaccaaagcccgcagagcggcatagggacgacagcaggggtcttgtgcttcctgggtacaagtacctcggacccttcaacggactcgacaagggagagccggtcaacgaggcagacgccgcggccctcgagcacgacaaagcctacgaccggcagctcgacagcggagacaacccgtacctcaagtacaaccacgccgacgcggagtttcaggagcgccttaaagaagatacgtcttttgggggcaacctcggacgagcagtcttccaggcgaaaaagagggttcttgaacctctgggcctggttgaggaacctgttaagacggctccgggaaaaaagaggccggtagagcactctcctgtggagccagactcctcctcgggaaccggaaaggcgggccagcagcctgcaagaaaaagattgaattttggtcagactggagacgcagactcagtacctgacccccagcctctcggacagccaccagcagccccctctggtctgggaactaatacgatggctacaggcagtggcgcaccaatggcagacaataacgagggcgccgacggagtgggtaattcctcgggaaattggcattgcgattccacatggatgggcgacagagtcatcaccaccagcacccgaacctgggccctgcccacctacaacaaccacctctacaaacaaatttccagccaatcaggagcctcgaacgacaatcactactttggctacagcaccccttgggggtattttgacttcaacagattccactgccacttttcaccacgtgactggcaaagactcatcaacaacaactggggattccgacccaagagactcaacttcaagctctttaacattcaagtcaaagaggtcacgcagaatgacggtacgacgacgattgccaataaccttaccagcacggttcaggtgtttactgactcggggtaccagctcccgtacgtcctcggctcggcgcatcaaggatgcctcccgccgttcccagcagacgtcttcatggtgccacagtatggataccccaccctgaacaacgggagtcaggcagtaggacgctcttcattttactgcctggagtactttccttctcagatgctgcgtaccggaaacaactttaccttcagctacacttttgaggacgttcctttccacagcagctacgctcacagccagagtctggaccgtctcatgaatcctctcatcgaccagtacctgtattacttgagcacaacaaacactccaagtggaaccaccacgcagtcaaggcttcagttttctcaggccggagcgagtgacattcgggaccagtctaggaactggcttcctggaccctgttaccgccagcagcgagtatcaaagacatctgcggataacaacaacagtgaatactcgtggactggagctaccaagtaccacctcaatggcagagactctctggtgaatccgggcccggccgtggcaagccacaaggacgatgaagaaaagttttttcctcagagcggggttctcatctttgggaagcaaggctcagagaaaacaaatgtggacattgaaaaggtcatgattacagacgaagaggaaatcaggacaaccaatcccgtggctacggagcagtatggttctgtatctaccaacctccagagaggcaacagacaagcagctaccgcagatgtcaacacacaaggcgttcttccaggcatggtctggcaggacagagatgtgtaccttcaggggcccatctgggcaaagattccacacacggacggacattttcacccctctcccctcatgggtggattcggacttaaacaccctcctccacagattctcatcaagaacaccccggtacctgcgaatccttcgaccaccttcagtgcggcaaagtttgcttccttcatcacacagtactccacgggacaggtcagcgtggagatcgagtgggagctgcagaaggaaaacagcaaacgctggaatcccgaaattcagtacacttccaactacaacaagtctgttaatgtggactttactgtggacactaatggcgtgtattcagagcctcgccccattggcaccagatacctgactcgtaatctgtaa

SEQ ID NO: 294 - protein, 735 aa, Adeno-associated virus
MAADGYLPDWLEDTLSEGIRQWWKLKPGPPPPKPAERHRDDSRGLVLPGYKYLGPFNGLDKGEPVNEADAAALEHDKAYDRQLDSGDNPYLKYNHADAEFQERLKEDTSFGGNLGRAVFQAKKRVLEPLGLVEEPVKTAPGKKRPVEHSPVEPDSSSGTGKAGQQPARKRLNFGQTGDADSVPDPQPLGQPPAAPSGLGTNTMATGSGAPMADNNEGADGVGNSSGNWHCDSTWMGDRVITTSTRTWALPTYNNHLYKQISSQSGASNDNHYFGYSTPWGYFDFNRFHCHFSPRDWQRLINNNWGFRPKRLNFKLFNIQVKEVTQNDGTTTIANNLTSTVQVFTDSGYQLPYVLGSAHQGCLPPFPADVFMVPQYGYPTLNNGSQAVGRSSFYCLEYFPSQMLRTGNNFTFSYTFEDVPFHSSYAHSQSLDRLMNPLIDQYLYYLSTTNTPSGTTTQSRLQFSQAGASDIRDQSRNWLPGPCYRQQRVSKTSADNNNSEYSWTGATKYHLNGRDSLVNPGPAVASHKDDEEKFFPQSGVLIFGKQGSEKTNVDIEKVMITDEEEIRTTNPVATEQYGSVSTNLQRGNRQAATADVNTQGVLPGMVWQDRDVYLQGPIWAKIPHTDGHFHPSPLMGGFGLKHPPPQILIKNTPVPANPSTTFSAAKFASFITQYSTGQVSVEIEWELQKENSKRWNPEIQYTSNYNKSVNVDFTVDTNGVYSEPRPIGTRYLTRNL

SEQ ID NO: 295 - DNA, 2211 bp, Adeno-associated virus
atggctgccgacggttatcttccagattggctcgaggacactctctctgaaggaataagacagtggtggaagctcaaacctggcccaccaccaccaaagcccgcagagcggcataaggacgacagcaggggtcttgtgcttcctgggtacaagtacctcggacccttcaacggactcgacaagggagagccggtcaacgaggcagacgccgcggccctcgagcacgacaaagcctacgaccggcagctcgacagcggagacaacccgtacctcaagtacaaccacgccgacgcggagtttcaggagcgccttaaagaagatacgtcttttgggggcaacctcgggcgggcagtcttccaggccaagaagcgggttctcgaacctctcggtctggttgaggaaggcgctaagacggctcctggaaagaaacgtccggtagagcagtcgccacaagagccagactccccctcgggcatcggcaagacaggccagcagcccgctaaaaagagactcaattttggtcagactggcgactcagagtcagtccccgatccacaacctctcggagaacctccagcaacccccgctgctgtgggacctactacaatggcttcaggcggtggcgcaccaatggcagacaataacgaaggcgccgacggagtgggtaatgcctcaggaaattggcactgcgattccacatggctgggcgacagagtcatcaccaccagcacccgcacctgggccttgcccacctacaataaccacctctacaagcaaatctccagtgcttcaacgggggccagcaacgacaaccactacttcggctacagcaccccctgggggtattttgatttcaacagattccactgccacttttcaccacgtgactggcagcgactcatcaacaacaattggggattccggcccaagagactcaacttcaaactcttcaacatccaagtcaaggaggtcacgacgaatgatggcgtcacaaccatcgctaataaccttaccagcacggttcaagtcttctcggactcggagtaccagcttccgtacgtcctcggctctgcgcaccagggccgcctccctccgttcccggcggacgtgttcatgattccgcaatacggctacctgacgctcaacaatggcagccaagccgtgggacgttcatcctcttactgcctggaatatttcccttctcagatgctgagaacgggcaacaactttaccttcagctacacctttgaggaagtgcctctccacagcagctgcgcgcacagccagagcctggaccggctgatgaatcctctcatcgaccaatacctgtattacctgaacagaactcaaaatcagtccggaagtgcccaaaacagggacttgctgttcagccgtgggtctccagctggcatgtctgttcagcccaaaaactggctacctggaccctgttatcggcagcagcgcgtttctaaaacaaaaacagacaacaacaacagcaattttacctggactggtgcttcaaaatataacctcaatgggcgtgaatccatcatcaaccctggcactgctatggcctcacacaaagacgacgaagacaagttctttcccatgagcggtgtcatgatttttggaaaagagagcgccggagcttcaaacactgcattggacaatgtcatgattacagacgaagaggaaattaaagccactaaccctgtggccaccgaaagatttgggaccgtggcagtcaatttccagagcagcagcacagaccctgcgaccggagatgtgcatgctatgggagcattacctggcatggtgtggcaagatagagacgtgtacctgcagggtcccatttgggccaaaattcctcacacagatggacactttcacccgtctcctcttatgggcggctttggactcaagaacccgcctcctcagatcctcatcaaaaacacgcctgttcctgcgaatcctccggcggagttttcagctacaaagtttgcttcattcatcacccaatactccgcaggacaagtgagtgtggaaattgaatgggagctgcagaaagaaaacagcaagcgctggaatcccgaagtgcagtacacatccaattatgcaaaatctgccaacgttgattttactgtggacaacaatggactttatactgagcctcgccccattggcacccgttaccttacccgtcccctgtaa

SEQ ID NO: 296 - protein, 736 aa, Adeno-associated virus
MAADGYLPDWLEDTLSEGIRQWWKLKPGPPPPKPAERHKDDSRGLVLPGYKYLGPFNGLDKGEPVNEADAAALEHDKAYDRQLDSGDNPYLKYNHADAEFQERLKEDTSFGGNLGRAVFQAKKRVLEPLGLVEEGAKTAPGKKRPVEQSPQEPDSPSGIGKTGQQPAKKRLNFGQTGDSESVPDPQPLGEPPATPAAVGPTTMASGGGAPMADNNEGADGVGNASGNWHCDSTWLGDRVITTSTRTWALPTYNNHLYKQISSASTGASNDNHYFGYSTPWGYFDFNRFHCHFSPRDWQRLINNNWGFRPKRLNFKLFNIQVKEVTTNDGVTTIANNLTSTVQVFSDSEYQLPYVLGSAHQGRLPPFPADVFMIPQYGYLTLNNGSQAVGRSSSYCLEYFPSQMLRTGNNFTFSYTFEEVPLHSSCAHSQSLDRLMNPLIDQYLYYLNRTQNQSGSAQNRDLLFSRGSPAGMSVQPKNWLPGPCYRQQRVSKTKTDNNNSNFTWTGASKYNLNGRESIINPGTAMASHKDDEDKFFPMSGVMIFGKESAGASNTALDNVMITDEEEIKATNPVATERFGTVAVNFQSSSTDPATGDVHAMGALPGMVWQDRDVYLQGPIWAKIPHTDGHFHPSPLMGGFGLKNPPPQILIKNTPVPANPPAEFSATKFASFITQYSAGQVSVEIEWELQKENSKRWNPEVQYTSNYAKSANVDFTVDNNGLYTEPRPIGTRYLTRPL

SEQ ID NO: 297 - protein, 736 aa, Adeno-associated virus
MAADGYLPDWLEDTLSEGIRQWWKLKPGPPPPKPAERHKDDSRGLVLPGYKYLGPFNGLDKGEPVNEADAAALEHDKAYDRQLDSGDNPYLKYNHADAEFQERLKEDTSFGGNLGRAVFQAKKRVLEPLGLVEEGAKTAPGKKRPVEQSPQEPDSSSGIGKTGQQPAKKRLNFGQTGDSESVPDPQPLGEPPATPAAVGPTTMASGGGAPMADNNEGADGVGNASGNWHCDSTWLGDRVITTSTRTWALPTYNNHLYKQISSASTGASNDNHYFGYSTPWGYFDFNRFHCHFSPRDWQRLINNNWGFRPKRLNFKLFNIQVKEVTTNDGVTTIANNLTSTVQVFSDSEYQLPYVLGSAHQGCLPPFPADVFMIPQYGYLTLNNGSQAVGRSSFYCLEYFPSQMLRTGNNFTFSYTFEEVPLHSSCAHSQSLDRLMNPLIDQYLYYLNRTQNQSGSAQNRDLLFSRGSPAGMSVQPKNWLPGPCYRQQRVSKTKTDNNNSNFTWTGASKYNLNGRESIINPGTAMASHKDDEDKFFPMSGVMIFGKESAGASNTALDNVMITDEEEIKATNPVATERFGTVAVNFQSSSTDPATGDVHAMGALPGMVWQDRDVYLQGPIWAKIPHTDGHFHPSPLMGGFGLKNPPPQILIKNTPVPANPPAEFSATKFASFITQYSTGQVSVEIEWELQKENSKRWNPEVQYTSNYAKSANVDFTVDNNGLYTEPRPIGTRYLTRPL

SEQ ID NO: 298 - DNA, 2208 bp, Adeno-associated virus
atggctgccgatggctatcttccagattggctcgaggacactctctctgaaggaataagacagtggtggaagctcaaacctggcccaccaccaccaaagcccgcagagcggcatagggacgacagcaggggtcttgtgcttcctgggtacaagtacctcggacccttcaacggactcgacaagggagagccggtcaacgaggcagacgccgcggccctcgagcacgacaaagcctacgaccggcagctcgacagcggagacaacccgtacctcaagtacaaccacgccgacgcggagtttcaggagcgccttaaagaagatacgtcttttgggggcaacctcggacgagcagtcttccaggcgaaaaagagggttcttgaacctctgggcctggttggggaacctgttaagacggctccgggaaaaaagaggccggtagagcactctcctgtggagccagactcctcctcgggaaccggaaaggcgggccagcagcctgcaagaaaaagattgaattttggtcagactggagacgcagactcagtacctgacccccagcctctcggacagccaccagcagccccctctggtctgggaactaatacgatggctacaggcagtggcgcaccaatggcagacaataacgagggcgccgacggagtgggtaattcctcgggaaattggcattgcgattccacatggatgggcgacagagtcatcaccaccagcacccgaacctgggccctgcccacctacaacaaccacctctacaaacaaatttccagccaatcaggagcctcgaacgacagtcactactttggctacagcaccccttgggggtattttgacttcaacagattccactgccacttttcaccacgtgactggcaaagactcatcaacaacaactggggattccgacccaagagactcaacttcaagctctttaacattcaagtcaaagaggtcacgcagaatgacggtacgacgacgattgccaataaccttaccagcacggttcaggtgtttactgactcggagtaccagctcccgtacgtcctcggctcggcgcatcaaggatgcctcccgccgttcccagcagacgtcttcatggtgccacagtatggatacctcaccctgaacaacgggagtcaggcagtaggacgctcttcattttactgcctggagtactttccttctcagatgctgcgtaccggaaacaactttaccttcagctacacttttgaggacgttcctttccacagcagctacgctcacagccagagtctggaccgtctcatgaatcctctcatcgaccagtacctgtattacttgagcacaacaaacactccaagtggaaccaccacgcagtcaaggctccagttttctcaggccggagcgagtgacattcgggaccagtctaggaactggcttcctggaccctgttaccgccagcagcgagtatcaaagacatctgcggataacaacaacagtgaatactcgtggactggagctaccaagtaccacctcaatggcagagactctctggtgaatccgggcccggccatggcaagccacaaggacaatgaagaaaagttttttcctcagagcggggttctcatctttgggaagcaaggctcagagaaaacaaatgtggacattgaaaaggtcatgattacagacgaagaggaaatcaggacaaccaatcccgtggctacggagcagtatggttctgtatctaccaacctccagagaggcaacagacaagcagctaccgcagatgtcaacacacaaggcgttcttccaggcatggtctggcaggacagagatgtgtaccttcaggggcccatctgggcaaagattccacacacggacggacattttcacccctctcccctcatgggtggattcggacttaaacaccctcctccacagattctcatcaagaacaccccggtacctgcgaatccttcgaccaccttcagtgcggcaaagtttgcttccttcatcacacagtactccacgggacaggtcagcgtggagatcgagtgggagctgcagaaggaaaacagcaaacgctggaatcccgaaattcagtacacttccaactacaacaagtctgttaatgtggactttactgtggacactaatggcgtgtattcagagcctcgccccattggcaccagatacctgactcgtaatctgtaa

SEQ ID NO: 299 - protein, 735 aa, Adeno-associated virus
MAADGYLPDWLEDTLSEGIRQWWKLKPGPPPPKPAERHRDDSRGLVLPGYKYLGPFNGLDKGEPVNEADAAALEHDKAYDRQLDSGDNPYLKYNHADAEFQERLKEDTSFGGNLGRAVFQAKKRVLEPLGLVGEPVKTAPGKKRPVEHSPVEPDSSSGTGKAGQQPARKRLNFGQTGDADSVPDPQPLGQPPAAPSGLGTNTMATGSGAPMADNNEGADGVGNSSGNWHCDSTWMGDRVITTSTRTWALPTYNNHLYKQISSQSGASNDSHYFGYSTPWGYFDFNRFHCHFSPRDWQRLINNNWGFRPKRLNFKLFNIQVKEVTQNDGTTTIANNLTSTVQVFTDSEYQLPYVLGSAHQGCLPPFPADVFMVPQYGYLTLNNGSQAVGRSSFYCLEYFPSQMLRTGNNFTFSYTFEDVPFHSSYAHSQSLDRLMNPLIDQYLYYLSTTNTPSGTTTQSRLQFSQAGASDIRDQSRNWLPGPCYRQQRVSKTSADNNNSEYSWTGATKYHLNGRDSLVNPGPAMASHKDNEEKFFPQSGVLIFGKQGSEKTNVDIEKVMITDEEEIRTTNPVATEQYGSVSTNLQRGNRQAATADVNTQGVLPGMVWQDRDVYLQGPIWAKIPHTDGHFHPSPLMGGFGLKHPPPQILIKNTPVPANPSTTFSAAKFASFITQYSTGQVSVEIEWELQKENSKRWNPEIQYTSNYNKSVNVDFTVDTNGVYSEPRPIGTRYLTRNL

SEQ ID NO: 300 - protein, 737 aa, Adeno-associated virus
RMAADGYLPDWLEDNLSEGIREWWDLKPGAPKPKANQQKQDDGRGLVLPGYKYLGPFNGLDKGEPVNAADAAALEHDKAYDQQLKAGDNPYLRYNHADAEFQERLQEDTSFGGNLGRAVFQAKKRVLEPLGLVEEGAKTAPGKKRPVEQSPQEPDSSSGIGKTGQQPAKKRLNFGQTGDSESVPDPQPLGEPPATPAAVGPTTMASGGGAPMADNNEGADGVGNASGNWHCDSTWLGDRVITTSTRTWALPTYNNHLYKQISSTSTGASNDNHYFGYGTPWGYFDFNRFHCHFSPRDWQRLINNNWGFRPKRLNFKLFNIQVEEVTTNDGVTTIANNLTSTVQVFSDSEYQLPYVLGSAHQGCLPPFPADVFMIPQYGYLTLNNGSQAVGRSSFYCLEYFPSQMLRTGNNFTFSYTFEEVPFHSSYAHSQSLDRLMNPLIDQYLYYLNRTQNQSGSAQNKDLLFSRGSPAGMSVQPKNWLPGPCYRQQRVSKTKTDNNNSNFTWTGASKYNLNGRESIINPGTAVASHKDDEDKFFPMSGVMIFGKESAGASSTALDNVMITDEEEIKATNPVATERFGTVAVNFQSSSTDPATGDVHAMGALPGMVWQDRDVYLQGPIWAKIPHTDGHFHPSPLMGGFGLKNPPPQILIKNTPVPANPPAEFSATKFASFITQYSTGQVSVEIEWELQKENSKRWNPEVQYTSNYAKSANVDFTVDNNGLYTEPRPIGTRYLTRPL

SEQ ID NO: 301 - protein, 736 aa, Adeno-associated virus
MAADGYLPDWLEDNLSEGIREWWDLKPGAPKPKANQQKQDDGRGLVLPGYKYLGPFNGLDKGEPVNAADAAALEHDKAYDQQLKAGDNPYLRYNHADAEFQERLQEDTSFGGNLGRAVFQAKKRVLEPLGLVEEGAKTAPGKKRPVEQSPQEPDSSSGIGKTGQQPAKKRLNFGQTGDSESVPDPQPLGEPPATPAAVGPTTMASGGGAPMADNNEGADGVGNASGNWHCDSTWLGDRVITTSTRTWALPTYNNHLYKQISSTSTGASNDNHYFGYGTPWGYFDFNRFHCHFSPRDWQRLINNNWGFRPKRLNFKLFNIQVEEVTTNDGVTTIANNLTSTVQVFSDSEYQLPYVLGSAHQGCLPPFPADVFMIPQYGYLTLNNGSQAVGRSSFYCLEYFPSQMLRTGNNFTFSYTFEEVPFHSSYAHSQSLDRLMNPLIDQYLYYLNRTQNQSGSAQNKDLLFSRGSPAGMSVQPKNWLPGPCYRQQRVSKTKTDNNNSNFTWTGASKYNLNGRESIINPGTAVASHKDDEDKFFPMSGVMIFGKESAGASSTALDNVMITDEEEIKATNPVATERFGTVAVNFQSSSTDPATGDVHAMGALPGMVWQDRDVYLQGPIWAKIPHTDGHFHPSPLMGGFGLKNPPPQILIKNTPVPANPPAEFSATKFASFITQYSTGQVSVEIEWELQKENSKRWNPEVQYTSNYAKSANVDFTVDNNGLYTEPRPIGTRYLTRPL

SEQ ID NO: 302 - DNA, 2211 bp, Adeno-associated virus
atggctgccgatggttatcttccagattggctcgaggacaacctctctgagggcattcgcgagtggtgggacttgaaacctggagccccgaagcccaaagccaaccagcaaaagcaggacgacggccggggtctggtgcttcctggctacaagtacctcggacccttcaacggactcgacaagggggagcccgtcaacgcggcggacgcagcggccctcgagcacgacaaggcctacgaccagcagctcaaagcgggtgacaatccgtacctgcggtataaccacgccgacgccgagtttcaggagcgtctgcaagaagatacgtcttttgggggcaacctcgggcgagcagtcttccaggccaagaagcgggttctcgaacctctcggtctggttgaggaaggcgctaagacggctcctggaaagaaacgtccggtagagcagtcgccacaagagccagactcctcctcgggcatcggcaagacaggccagcagcccgctaaaaagagactcaattttggccagactggcgactcagagtcagtccccgatccacaacctctcggagaacctccagcaacccccgctgctgtgggacctactacaatggcttcaggcggtggcgcaccaatggcagacaataacgaaggcgccgacggagtgggtaatgcctcaggaaattggcattgcgattccacatggctgggcgacagagtcatcaccaccagcacccgcacctgggccttgcccacctacaataaccacctctacaagcaaatctccagtacttcaacgggggccagcaacgacaaccactacttcggctacggcaccccctgggggtattttgatttcaacagattccactgccacttttcaccacgtgactggcagcgactcatcaacaacaattggggattccggcccaagagactcaacttcaaactcttcaacatccaagtcgaggaggtcacgacgaatgatggcgtcacaaccatcgctaataaccttaccagcacggttcaagtcttctcggactcggagtaccagcttccgtacgtcctcggctctgcgcaccagggctgcctccctccgttcccggcggacgtgttcatgattccgcaatacggctacctgacgctcaacaatggcagccaagccgtgggacgttcatccttttactgcctggaatatttcccttctcagatgctgagaacgggcaacaactttaccttcagctacacctttgaggaagtgcctttccacagcagctacgcgcacagccagagcctggaccggctgatgaatcctctcatcgaccaatacctgtattacctgaacagaacacaaaatcagtccggaagtgcccaaaacaaggacttgctgtttagccgtgggtctccagctggcatgtctgttcagcccaaaaactggctacctggaccctgttatcggcagcagcgcgtttctaaaacaaaaacagacaacaacaacagcaattttacctggactggtgcttcaaaatataacctcaatgggcgtgaatccatcatcaaccctggcaccgctgtggcctcacacaaagacgacgaagacaagttctttcccatgagcggtgtcatgatttttggaaaagagagcgccggagcttcaagcactgcattggacaatgtcatgattacagacgaagaggaaattaaagccactaaccctgtggccaccgaaagatttgggaccgtggcagtcaatttccagagcagcagcacagaccctgcgaccggagatgtgcatgctatgggagcattacctggcatggtgtggcaagatagagacgtgtacctgcagggtcccatttgggccaaaattcctcacacagatggacactttcacccgtctcctcttatgggcggctttggactcaagaacccgcctcctcagatcctcatcaaaaacacgcctgttcctgcgaatcctccggcggagttttcagctacaaagtttgcttcattcatcacccaatactccacaggacaagtgagtgtggaaattgaatgggagctgcagaaagaaaacagcaagcgctggaatcccgaagtgcagtacacatccaattatgcaaaatctgccaacgttgattttactgtggacaacaatggactttatactgagcctcgccccattggcacccgttaccttacccgtcccctgtaa

SEQ ID NO: 303 - protein, 737 aa, Adeno-associated virus
RMAADGYLPDWLEDNLSEGIREWWDLKPGAPKPKANQQKQDDGRGLVLPGYKYLGPFNGLDKGEPVNAADAAALEHDKAYDQQLKAGDNPYLRYNHADAEFQERLQEDTSFGGNLGRAVFQAKKRVLEPLGLVEEGAKTAPGKKRPVEQSPQEPDSSSGIGKTGQQPAKKRLNFGQTGDSESVPDPQPLGEPPATPAAVGPTTMASGGGAPMADNNEGADGVGNASGNWHCDSTWLGDRVITTSTRTWALPTYNNHLYKQISSTSTGASNDNHYFGYSTPWGYFDFNRFHCHFSPRDWQRLINNNWGFRPKRLNFKLFNIQVEEVTTNDGVTTIANNLTSTVQVFSDSEYQLPYVLGSAHQGCLPPFPADVFMIPQYGYLTLNNGSQAVGRSSFYCLEYFPSQMLRTGNNFTFSYTFEEVPFHSSYAHSQSLDRLMNPLIDQYLYYLNRTQNQSGSAQNKDLLFSRGSPAGMSVQPKNWLPGPCYRQQRVSKTKTDNNNSNFTWTGASKYNLNGRESIINPGTAVASHKDDEDKFFPMSGVMIFGKESAGASSTALDNVMITDEEEIKATNPVATERFGTVAVNFQSSSTDPATGDVHAMGALPGMVWQDRDVYLQGPIWAKIPHTDGHFHPSPLMGGFGLKNPPPQILIKNTPVPANPPAEFSATKFASFITQYSTGQVSVEIEWELQKENSKRWNPEVQYTSNYAKSANVDFTVDNNGLYTEPRPIGTRYLTRPL

SEQ ID NO: 304 - protein, 737 aa, Adeno-associated virus
RMAADGYLPDWLEDNLSEGIREWWDLKPGAPKPKANQQKQDDGRGLVLPGYKYLGPFNGLDKGEPVNAADAAALEHDKAYDQQLKAGDNPYLRYNHADAEFQERLQEDTSFGGNLGRAVFQAKKRVLEPLGLVEEGAKTAPGKKRPVEQSPQEPDSSSGIGKTGQQPAKKRLNFGQTGDSESVPDPQPLGEPPATPAAVGPTTMASGGGAPMADNNEGADGVGNASGNWHCDSTWLGDRVITTSTRTWALPTYNNHLYKQISSTSTGASNDNHYFGYSTPWGYFDFNRFHCHFSPRDWQRLINNNWGFRPKRLNFKLFNIQVKEVTTNDGVTTIANNLTSTVQVFSDSEYQLPYVLGSAHQGCLPPFPADVFMIPQYGYLTLNNGSQAVGRSSFYCLEYFPSQMLRTGNNFTFSYTFEEVPFHSSYAHSQSLDRLMNPLIDQYLYYLNRTQNQSGSAQNKDLLFSRGSPAGMSVQPKNWLPGPCYRQQRVSKTKTDNNNSNFTWTGASKYNLNGRESIINPGTAVASHKDDEDKFFPMSGVMIFGKESAGASSTALDNVMITDEEEIKATNPVATERFGTVAVNFQSSSTDPATGDVHAMGALPGMVWQDRDVYLQGPIWAKIPHTDGHFHPSPLMGGFGLKNPPPQILIKNTPVPANPPAEFSATKFASFITQYSTGQVSVEIEWELQKENSKRWNPEVQYTSNYAKSANVDFTVDNNGLYTEPRPIGTRYLTRPL

SEQ ID NO: 305 - protein, 737 aa, Adeno-associated virus
RMAADGYLPDWLEDNLSEGIREWWDLKPGAPKPKANQQKQDDGRGLVLPGYKYLGPFNGLDKGEPVNAADAAALEHDKAYDQQLKAGDNPYLRYNHADAEFQERLQEDTSFGGNLGRAVFQAKKRVLEPLGLVEEGAKTAPGKKRPVEQSPQEPDSSSGIGKTGQQPAKKRLNFGQTGDSESVPDPQPLGEPPATPAAVGPTTMASGGGAPMADNNEGADGVGNASGNWHCDSTWLGDRVITTSTRTWALPTYNNHLYKQISSTSTGASNDNHYFGYSTPWGYFDFNRFHCHFSPRDWQRLINNNWGFRPKRLNFKLFNIQVKEVTTNDGVTTIANNLTSTVQVFSDSEYQLPYVLGSAHQGCLPPFPADVFMIPQYGYLTLNNGSQAVGRSSFYCLEYFPSQMLRTGNNFTFSYTFEEVPFHSSYAHSQSLDRLMNPLIDQYLYYLNRTQNQSGSAQNKDLLFSRGSPAGMSVQPKNWLPGPCYRQQRVSKTKTDNNNSNFTWTGASKYNLNGRESIINPGTAVASHKDDEDKFFPMSGVMIFGKESAGANSTALDNVMITDEEEIKATNPVATERFGTVAVNFQSSSTDPATGDVHAMGALPGMVWQDRDVYLQGPIWAKIPHTDGHFHPSPLMGGFGLKNPPPQILIKNTPVPANPPAEFSATKFASFITQYSTGQVSVEIEWELQKENSKRWNPEVQYTSNYAKSANVDFTVDNNGLYTEPRPIGTRYLTRPL

SEQ ID NO: 306 - DNA, 2208 bp, Adeno-associated virus
atggctgccgatggttatcttccagattggctcaaggacactctctctgaaggaataagacagtggtggaagctcaaacctggcccaccaccaccaaagcccgcagagcggcataaggacgacagcgggggtcttgtgcttcctgggtacaagtacctcggacccttcaacggactcgacaagggagagccggtcaacgaggcagacgccgcggccctcgagtacgacaaggcctacgaccggcagctcgacagcggagacaacccgtacctcaagtacaaccacgccgacgcggagtttcaggagcgccttaaagaagatacgtcttttgggggcaacctcggacgagcagtcttccaggcgaaaaagagggttcttgaacctctgggcctggttgaggaacctgttaagacggctccgggaaaaaagaggccggtagagcactctcctgtggagccagactcctcctcgggaacaggaaaagcgggccagcagcctgcgagaaagagattgaattttggtcagactggagacgcagactccgtacctgacccccagcctctcggacagccaccagcagccccctctggtctgggaactaatacgatggctacaggcagtggcgcaccaatggcagacaataacgagggcgccgacggagtgggtaattcctcgggaagttggcattgcgattccacatggatgggcgacagagtcatcaccaccagcacccgaacctgggctctgcccacctacaacaaccatctgtacaagcagatctccagccaatcaggagccagcaacgacaaccactactttggctacagcaccccttgggggtattttgacttcaacagattccactgccacttttcaccacgtgactggcaaagactcatcaacaacaactggggattccggcccaagagactcaacttcaagctctttaacattcaagtcaaggaggtcacgcagaatgacggtacgacgacgattgccaataaccttaccagcacggttcaggtgtttactgactcggagtaccagctcccgtacgtccccggctcggcgcatcaaggatgcctcccgccgttcccagcagacgtcttcatggtgccacagtatggatacctcaccctgaacaacgggagtcaggcagtaggacgctcttcattttactgcctggagtactttccttctcagatgcttcgtaccggaaacaactttaccttcagctacacctttgaggatgttcctttccacagcagctacgctcacagccagagtttggaccgtctcatgaatcctctcatcgaccagtacctgtattacttgagcagaacaaacactccaagcggaaccaccacgcagtccaggcttcagttttctcaggccggagcaagtgacattcgggaccagtctaggaactggcttcctggaccctgttaccgccagcagcgagtatcaaagacagctgcggacaacaacaacagtgaatactcgtggactggagctaccaagtaccacctcaatggcagagactctctggtgaatccgggcccggccatggccagccacaaggacgatgaagaaaagttttttcctcaaagcggggttctcatctttgggaagcaaggctcagagaaaacaaatgtggacattgaaaaggtcatgattacagacgaagaggaaatcagaaccaccaatcccgtggccacggagcagtatggttctgtatctaccaacctccagagcggcaacacacaagcagctactgcagatgtcaacacacaaggcgttcttccaggcatggtctggcaggacagagacgtgcacctgcaggggcctatctgggcaaagattccacacacggacggacattttcacccctctcccctcatgggcggatttggacttaaacaccctcctccacagattctcatcaagaacaccccggtacctgcaaatccttcgaccaccttcagtgcggcaaagtttgcttccttcatcacacagtattccacagggcaggtcagcgtggagatcgagtgggagctgcagaaggagaacagcaaacgctggaaccccgagatccagtacacttccaactacaacaaatctgttaatgtggactttactgtggacactaatggtgtgtattcagagcctcgccccattggcaccagatacctgactcgtaatctgtaa

SEQ ID NO: 307 - protein, 735 aa, Adeno-associated virus
MAADGYLPDWLKDTLSEGIRQWWKLKPGPPPPKPAERHKDDSGGLVLPGYKYLGPFNGLDKGEPVNEADAAALEYDKAYDRQLDSGDNPYLKYNHADAEFQERLKEDTSFGGNLGRAVFQAKKRVLEPLGLVEEPVKTAPGKKRPVEHSPVEPDSSSGTGKAGQQPARKRLNFGQTGDADSVPDPQPLGQPPAAPSGLGTNTMATGSGAPMADNNEGADGVGNSSGSWHCDSTWMGDRVITTSTRTWALPTYNNHLYKQISSQSGASNDNHYFGYSTPWGYFDFNRFHCHFSPRDWQRLINNNWGFRPKRLNFKLFNIQVKEVTQNDGTTTIANNLTSTVQVFTDSEYQLPYVPGSAHQGCLPPFPADVFMVPQYGYLTLNNGSQAVGRSSFYCLEYFPSQMLRTGNNFTFSYTFEDVPFHSSYAHSQSLDRLMNPLIDQYLYYLSRTNTPSGTTTQSRLQFSQAGASDIRDQSRNWLPGPCYRQQRVSKTAADNNNSEYSWTGATKYHLNGRDSLVNPGPAMASHKDDEEKFFPQSGVLIFGKQGSEKTNVDIEKVMITDEEEIRTTNPVATEQYGSVSTNLQSGNTQAATADVNTQGVLPGMVWQDRDVHLQGPIWAKIPHTDGHFHPSPLMGGFGLKHPPPQILIKNTPVPANPSTTFSAAKFASFITQYSTGQVSVEIEWELQKENSKRWNPEIQYTSNYNKSVNVDFTVDTNGVYSEPRPIGTRYLTRNL

SEQ ID NO: 308 - DNA, 2208 bp, Adeno-associated virus
atggctgccgatggttatcttccagattggctcgaggacactctctctgaaggaataagacagtggtggaagctcaaacctggcccaccaccaccaaagcccgcagagcggcataaggacgacagcaggggtcttgtgcttcctgggtacaagtacctcggacccttcaacggactcgacaagggggagccggtcaacgaggcagacgccgcggccctcgagcacgacaaggcctacgaccggcagctcgacagcggagacaacccgtacctcaagtacaaccacgccgacgcagagtttcaggagcgccttaaagaagatacgtcttttgggggcaacctcggacgagcagtcttccaggcgaaaaagagggttcttgaacctctgggcctggttgaggaacctgttaagacggctccgggaaaaaagaggccggtagagcactctcctgtggagccagactcctcctcgggaaccggaaaagcgggccagcagcctgcaagaaaaagattaaattttggtcagactggagacgcagactccgtacctgacccccagcctctcggacagccaccagcagccccctctggtctgggatctactacaatggctacaggcagtggcgcaccaatggcagacaataacgagggtgccgatggagtgggtaattcctcaggaaattggcattgcgattcccaatggctgggcgacagagtcatcaccaccagcacccgaacctgggccctgcccacatacaacaaccacctctacaagcaaatctccagccaatcaggagccagcaacgacaaccactactttggctacagcaccccctgggggtattttgacttcaacagattccactgccacttttcaccacgtgactggcaaagactcatcaacaacaactggggattccggcccaaaagactcaacttcaagctctttaatattcaagtcaaagaggtcacgcagaatgacggtacgacgacgattgccaataaccttaccagcacggttcaggtgtttactgactcggagtaccagctcccgtacgtcctgggctcggcgcatcaaggatgcctcccgccgtttccagcggacgtcttcatggtcccacagtatggatacctcaccctgaacaacgggagtcaggcggtaggacgctcttccttttactgcctggagtactttccttctcagatgctgcgtactggaaacaactttcagttcagctacacttttgaagacgtgcctttccacagcagctacgctcacagccagagtctggatcggctgatgaatcctctgatcgaccagtacctgtattatctgaacaagacacaaacaaatagtggaactcttcagcagtctcggctactgtttagccaagctggaccaaccaacatgtctcttcaagctaaaaactggctgcctggaccttgctacagacagcagcgtctgtcaaaacaggcaaacgacaacaacaacagcaactttccctggactgcagctacaaagtatcatctaaatggccgggactcgttggttaatccaggaccagctatggccagtcgcaaggatgacgaagaaaagtttttccccatgcatggaaccctgatatttggtaaacaaggaacaaatgccaacgacgcggatttggaaaatgtcatgattacagatgaagaagaaatcagggccaccaatcccgtggctacggagcagtacgggactgtgtcaaataatttgcaaaactcaaacactggtccaactactggaactgtcaatcaccaaggagcgttacctggtatggtgtggcaggatcgagacgtgtacctgcagggacccatttgggccaagattcctcacaccgatggacactttcatccttctccactgatgggaggttttggactcaaacacccgcctcctcagatcatgatcaaaaacactcccgttccagccaatcctcccacaaacttcagttctgccaagtttgcttctttcatcacacagtattccacgggacaggtcagcgtggagatcgagtgggagctgcagaaggagaacagcaaacgctggaatcccgaaattcagtacacttccaactacaacaagtctgttaatgtggactttactgtggacactaatggtgtgtattcagagcctcgccccattggcaccagatacctgactcgtaatctgtaa

SEQ ID NO: 309 - protein, 735 aa, Adeno-associated virus
MAADGYLPDWLEDTLSEGIRQWWKLKPGPPPPKPAERHKDDSRGLVLPGYKYLGPFNGLDKGEPVNEADAAALEHDKAYDRQLDSGDNPYLKYNHADAEFQERLKEDTSFGGNLGRAVFQAKKRVLEPLGLVEEPVKTAPGKKRPVEHSPVEPDSSSGTGKAGQQPARKRLNFGQTGDADSVPDPQPLGQPPAAPSGLGSTTMATGSGAPMADNNEGADGVGNSSGNWHCDSQWLGDRVITTSTRTWALPTYNNHLYKQISSQSGASNDNHYFGYSTPWGYFDFNRFHCHFSPRDWQRLINNNWGFRPKRLNFKLFNIQVKEVTQNDGTTTIANNLTSTVQVFTDSEYQLPYVLGSAHQGCLPPFPADVFMVPQYGYLTLNNGSQAVGRSSFYCLEYFPSQMLRTGNNFQFSYTFEDVPFHSSYAHSQSLDRLMNPLIDQYLYYLNKTQTNSGTLQQSRLLFSQAGPTNMSLQAKNWLPGPCYRQQRLSKQANDNNNSNFPWTAATKYHLNGRDSLVNPGPAMASRKDDEEKFFPMHGTLIFGKQGTNANDADLENVMITDEEEIRATNPVATEQYGTVSNNLQNSNTGPTTGTVNHQGALPGMVWQDRDVYLQGPIWAKIPHTDGHFHPSPLMGGFGLKHPPPQIMIKNTPVPANPPTNFSSAKFASFITQYSTGQVSVEIEWELQKENSKRWNPEIQYTSNYNKSVNVDFTVDTNGVYSEPRPIGTRYLTRNL

SEQ ID NO: 310 - DNA, 2208 bp, Adeno-associated virus
atggctgccgatggttatcttccagattggctcgaggacactctctctgaaggaataagacagtggtggaagctcaaacctggcccaccaccaccaaagcccgcagagcggcataaggacgacagcaggggtcttgtgcttcctgggtacaagtacctcggacccttcaacggactcgacaagggagagccggtcaacgaggcagacgccgcggccctcgagcacgacaaagcctacgaccggcagctcgacagcggagacaacccgtacctcaagtacaaccacgccgacgcggagtttcaggagcgccttaaagaagatacgtcttttgggggcaacctcggacgagcagtcttccaggcgaaaaagagggttcttgaacctctgggcctggttggggaacctgtcaagacggctccaggaaaaaagaggccggtagagcactctcctgtggagccagactcctcctcgggaaccggaaaggcgggccagcagcctgcaagaaaaagattgaattttggtcagactggagacgcagactcagtacctgacccccagcctctcggacagccaccagcagccccctctggtctgggaactaatacgatggctacaggcagtggcgcaccaatggcagacaataacgagggcgccgacggagtgggtaattcctcgggaaattggcattgcgattccacatggatgggcgacagagtcatcaccaccagcacccgaacctgggccctgcccacctacaacaaccacctctacaaacaaatttccagccaatcaggagcctcgaacgacaatcactactttggctacagcaccccttgggggtattttgacttcaacagattccactgccacttttcaccacgtgactggcaaagactcatcaacaacaactggggattccgacccaagagactcaacttcaagctctttaacattcaagtcaaagaggtcacgcagaatgacggtacgacgacgattgccaataaccttaccagcacggttcaggtgtttactgactcggagtaccagctcccgtacgtcctcggctcggcgcatcaaggatgcctcccgccgttcccagcagacgtcttcatggtgccacagtatggatacctcaccctgaacaacgggagtcaggcagtaggacgctcttcattttactgcctggagtactttccttctcagatgctgcgtaccggaaacaactttaccttcagctacacttttgaggacgttcctttccacagcggctacgctcacagccagagtctggaccgtctcatgaatcctctcatcgaccagtacctgtattacttgagcacaacaaacactccaagtggaaccaccacgcagtcaaggcttcagttttctcaggccggagcgagtgacattcgggaccagtctaggaactggcttcctggaccctgttaccgccagcagcgagtatcaaagacatctgcggataacaacaacagtgaatactcgtggactggagctaccaagtaccacctcaatggcagagactctctggtgaatccgggcccggccatggcaagccacaaggacaatgaagaaaagttttttcctcagagcggggttctcatctttgggaagcaaggctcagagaaaacaaatgtggacattgaaaaggtcatgattacagacgaagaggaaatcaggacaaccaatcccgtggctacggagcagtacggttctgtatctaccaacctccagagaggcaacagacaagcagctaccgcagatgtcaacacacaaggcgttcttccaggcatggtctggcaggacagagatgtgtaccttcaggggcccatctgggcaaagattccacacacggacggacattttcacccctctcccctcatgggtggattcggacttaaacaccctcctccacagattctcatcaagaacaccccggtacctgcgaatccttcgaccaccttcagtgcggcaaagtttgcttccttcatcacacagtactccacgggacaggtcagcgtggagatcgagtgggagctgcagaaggaaaacagcaaacgctggaatcccgaaattcagtacacttccaactacaacaagtctgttaatgtggactttactgtggacactaatggcgtgtattcagagcctcgccccattggcaccagatacctgactcgtaatctgtaa

SEQ ID NO: 311 - protein, 735 aa, Adeno-associated virus
MAADGYLPDWLEDTLSEGIRQWWKLKPGPPPPKPAERHKDDSRGLVLPGYKYLGPFNGLDKGEPVNEADAAALEHDKAYDRQLDSGDNPYLKYNHADAEFQERLKEDTSFGGNLGRAVFQAKKRVLEPLGLVGEPVKTAPGKKRPVEHSPVEPDSSSGTGKAGQQPARKRLNFGQTGDADSVPDPQPLGQPPAAPSGLGTNTMATGSGAPMADNNEGADGVGNSSGNWHCDSTWMGDRVITTSTRTWALPTYNNHLYKQISSQSGASNDNHYFGYSTPWGYFDFNRFHCHFSPRDWQRLINNNWGFRPKRLNFKLFNIQVKEVTQNDGTTTIANNLTSTVQVFTDSEYQLPYVLGSAHQGCLPPFPADVFMVPQYGYLTLNNGSQAVGRSSFYCLEYFPSQMLRTGNNFTFSYTFEDVPFHSGYAHSQSLDRLMNPLIDQYLYYLSTTNTPSGTTTQSRLQFSQAGASDIRDQSRNWLPGPCYRQQRVSKTSADNNNSEYSWTGATKYHLNGRDSLVNPGPAMASHKDNEEKFFPQSGVLIFGKQGSEKTNVDIEKVMITDEEEIRTTNPVATEQYGSVSTNLQRGNRQAATADVNTQGVLPGMVWQDRDVYLQGPIWAKIPHTDGHFHPSPLMGGFGLKHPPPQILIKNTPVPANPSTTFSAAKFASFITQYSTGQVSVEIEWELQKENSKRWNPEIQYTSNYNKSVNVDFTVDTNGVYSEPRPIGTRYLTRNL

SEQ ID NO: 312 - DNA, 2208 bp, Adeno-associated virus
atggctgccgatggttatcttccagattggctcgaggacactctctctgaaggaataagacagtggtggaagctcaaacctggcccaccaccaccaaagcccgcagagcggcataaggacgacagcaggggtcttgtgcttcctgggtacaagtacctcggacccttcaacggactcgacaagggagagccggtcaacgaggcagacgccgcggccctcgagcacgacaaagcctacgaccggcagctcgacagcggagacaacccgtacctcaagtacaaccacgccgacgcggagtttcaggagcgccttaaagaagatacgtcttttgggggcaacctcggacgagcagtcttccaggcgaaaaagagggttcttgaacctctgggcctggttggggaacctgttaagacggctccgggaaaaaagaggccggtagagcactctcctgtggagccagactcctcctcgggaaccggaaaggcgggccagcagcctgcaagaaaaagattgaattttggtcagactggagacgcagactcagtacctgacccccagcctctcggacagccaccagcagccccctctggtctgggaactaatacgatggctacaggcagtggcgcaccaatggcagacaataacgagggcgccgacggagtgggtaattcctcgggaaatcggcattgcgattccacatggatgggcgacagagtcatcaccaccagcacccgaacctgggccctgcccacctacaacaaccacctctacagacaaatttccagccaatcaggagcctcgaacgacaatcactactttggctacagcaccccttgggggtattttgacttcaacagattccactgccacttttcaccacgtgactggcaaagactcatcaacaacaactggggattccgacccaagagactcaacttcaagctctttaacattcaagtcaaagaggtcacgcagaatgacggtacgacgacgattgccaataaccttaccagcacggttcaggtgtttactgactcggagtaccagctcccgtacgtcctcggctcggcgcatcaaggatgcctcccgccgttcccagcagacgtcttcatggtgccacagtatggatacctcaccctgagcaacgggagtcaggcagtaggacgctcttcattttactgcccggagtactttccttctcagatgctgcgtaccggaaacaactttaccttcagctacacttttgaggacgttcctttccacagcagctacgctcacagccagagtctggaccgtctcatgaatcctctcatcgaccagtacctgtattacttgagcacaacaaacactccaagtggaaccaccacgcagtcaaggcttcagttttctcaggccggagcgagtgacattcgggaccagtctaggaactggcttcctggaccctgttaccgccagcagcgagtatcaaagacatctgcggataacaacaacagtgaatactcgtggactggagctaccaagtaccacctcaatggcagagactctctggtgaatccgggcccggccatggcaagccacaaggacaatgaagaaaagttttttcctcagagcggggttctcatctttgggaagcaaggctcagagaaaacaaatgtggacattgaaaaggtcatgattacagacgaagaggaaatcaggacaaccaatcccgtggctacggagcagtatggttctgtatctaccaacctccagagaggcaacagacaagcagctaccgcagatgtcaacacacaaggcgttcttccaggcatggtctggcaggacagagatgtgtaccttcaggggcccatctgggcaaagattccacacacggacggacattttcacccctctcccctcatgggtggattcggacctaaacaccctcctccacagattctcatcaagaacaccccggtacctgcgaatccttcgaccaccttcagtgcggcaaagtttgcttccttcatcacacagtactccacgggacaggtcagcgtggagatcgagtgggagctgcagaaggaaaacagcaaacgctggaatcccgaaattcagtacacttccaactacaacaagtctgttaatgtggactttactgtggacactaatggcgtgtattcagagcctcgccccattggcaccagatacctgactcgtaatttgtaa

SEQ ID NO: 313 - protein, 735 aa, Adeno-associated virus
MAADGYLPDWLEDTLSEGIRQWWKLKPGPPPPKPAERHKDDSRGLVLPGYKYLGPFNGLDKGEPVNEADAAALEHDKAYDRQLDSGDNPYLKYNHADAEFQERLKEDTSFGGNLGRAVFQAKKRVLEPLGLVGEPVKTAPGKKRPVEHSPVEPDSSSGTGKAGQQPARKRLNFGQTGDADSVPDPQPLGQPPAAPSGLGTNTMATGSGAPMADNNEGADGVGNSSGNRHCDSTWMGDRVITTSTRTWALPTYNNHLYRQISSQSGASNDNHYFGYSTPWGYFDFNRFHCHFSPRDWQRLINNNWGFRPKRLNFKLFNIQVKEVTQNDGTTTIANNLTSTVQVFTDSEYQLPYVLGSAHQGCLPPFPADVFMVPQYGYLTLSNGSQAVGRSSFYCPEYFPSQMLRTGNNFTFSYTFEDVPFHSSYAHSQSLDRLMNPLIDQYLYYLSTTNTPSGTTTQSRLQFSQAGASDIRDQSRNWLPGPCYRQQRVSKTSADNNNSEYSWTGATKYHLNGRDSLVNPGPAMASHKDNEEKFFPQSGVLIFGKQGSEKTNVDIEKVMITDEEEIRTTNPVATEQYGSVSTNLQRGNRQAATADVNTQGVLPGMVWQDRDVYLQGPIWAKIPHTDGHFHPSPLMGGFGPKHPPPQILIKNTPVPANPSTTFSAAKFASFITQYSTGQVSVEIEWELQKENSKRWNPEIQYTSNYNKSVNVDFTVDTNGVYSEPRPIGTRYLTRNL

SEQ ID NO: 314 - DNA, 2205 bp, Adeno-associated virus
atggctgccgatggttatcttccagattggctcgaggacactctctctgaaggaataagacagtggtggaagctcaaacctggcccaccaccaccaaagcccgcagagcggcataaggacgacagcaggggtcttgtgcttcctgggtacaagtacctcggacccttcaacggactcgacaagggagagccggtcaacgaggcagacgccgcggccctcgagcacgacaaggcctacgaccggcagctcgacagcggagacaacccgtacctcaagtacaaccacgccgacgcggagtttcaggagcgtcttaaagaagatacgtcttttgggggcaacctcggacgagcagtcttccaggcgaaaaagagggttcttgaacctctgggcctggttgaggaacctgttaagacggctccgggaaaaaagaggccggtagagcactctcctgcggagccagactcctcctcgggaaccggaaaagcgggccagcagcctgcaagaaaaagactgaatttcggtcagactggagacgcagactccgtacctgacccccagcctctcagacagccaccagcagcccccacaagtttgggatctactacaatggctacaggcagtggcgcaccaatggcagacaataacgagggtgccgatggagtgggtaattcctcaggaaattggcattgcgattcccaatggctgggcgacagagtcatcaccaccagcacccgaacctgggccctgcccacctacaacaaccacctttacaagcaaatctccagccaatcaggagcctcaaacgacaaccactactttggctacagcaccccctgggggtattttgacttcaacagattccactgccacttttcaccacgtgactggcaaagactcatcaacaacaactggggattccgacccaagagactcaacttcaagctctttaacattcaagtcaaagaggtcacgcagaatgacggtacgacgacgattgccaataaccttaccagcacggttcaggtgtttactgactcggagtaccagctcccgtacgtcctcggctcggcgcatcaaggatgcctcccgccgtttccagcggacgtcttcatggtcccacagtatggatacctcaccctgaacaacgggagtcaggcggtaggacgctcttccttttactgcctggagtactttccttctcagatgctgcgtactggaaacaactttcagttcagctacacttttgaagacgtgcctttccacagcagctacgctcacagccagagtttggatcggctgatgaatcctctgatcgaccagtacctgtattatctaaacagaacacaaacagctagtggaactcagcagtctcggctactgtttagccaagctggacccacaagcatgtctcttcaagctaaaaactggctgcctggaccgtgttatcgccagcagcgtttgtcaaagcaggcaaacgacaacaacaacagcaactttccctggactggagctaccaagtactacctcaatggcagagactctttggtgaacccgggcccggccatggccagccacaaggacgatgaagaaaagtttttccccatgcatggaaccctaatatttggtaaagaaggaacaaatgctaccaacgcggaattggaaaatgtcatgattacagatgaagaggaaatcaggaccaccaatcccgtggctacagagcagtacggatatgtgtcaaataatttgcaaaactcaaatactgctgcaagtactgaaactgtgaatcaccaaggagcattacctggtatggtgtggcaggatcgagacgtgtacctgcagggacccatttgggccaagattcctcacaccgatggacactttcatccttctccactgatgggaggttttggactcaaacacccgcctcctcagattatgatcaaaaacactcccgttccagccaatcctcccacaaacttcagttctgccaagtttgcttccttcatcacacagtattccacgggacaggtcagcgtggagatcgagtgggagctgcagaaggagaacagcaaacgctggaatcccgaaattcagtacacttccaactacaacaaatctgttaatgtggactttactgtggacactaatggtgtgtattcagagcctcgccccattggcaccagatacctgactcgtaatctgtaa

SEQ ID NO: 315 - protein, 734 aa, Adeno-associated virus
MAADGYLPDWLEDTLSEGIRQWWKLKPGPPPPKPAERHKDDSRGLVLPGYKYLGPFNGLDKGEPVNEADAAALEHDKAYDRQLDSGDNPYLKYNHADAEFQERLKEDTSFGGNLGRAVFQAKKRVLEPLGLVEEPVKTAPGKKRPVEHSPAEPDSSSGTGKAGQQPARKRLNFGQTGDADSVPDPQPLRQPPAAPTSLGSTTMATGSGAPMADNNEGADGVGNSSGNWHCDSQWLGDRVITTSTRTWALPTYNNHLYKQISSQSGASNDNHYFGYSTPWGYFDFNRFHCHFSPRDWQRLINNNWGFRPKRLNFKLFNIQVKEVTQNDGTTTIANNLTSTVQVFTDSEYQLPYVLGSAHQGCLPPFPADVFMVPQYGYLTLNNGSQAVGRSSFYCLEYFPSQMLRTGNNFQFSYTFEDVPFHSSYAHSQSLDRLMNPLIDQYLYYLNRTQTASGTQQSRLLFSQAGPTSMSLQAKNWLPGPCYRQQRLSKQANDNNNSNFPWTGATKYYLNGRDSLVNPGPAMASHKDDEEKFFPMHGTLIFGKEGTNATNAELENVMITDEEEIRTTNPVATEQYGYVSNNLQNSNTAASTETVNHQGALPGMVWQDRDVYLQGPIWAKIPHTDGHFHPSPLMGGFGLKHPPPQIMIKNTPVPANPPTNFSSAKFASFITQYSTGQVSVEIEWELQKENSKRWNPEIQYTSNYNKSVNVDFTVDTNGVYSEPRPIGTRYLTRNL

SEQ ID NO: 316 - DNA, 3160 bp, Adeno-associated virus
acccttcactaaagggactagtcctgcaggtttaaacgaattcgcccttgctgcgtcaactggaccaatgagaactttcccttcaacgactgtgtcgacaagatggtgatttggtgggaggaggggaagatgaccgccaaggtcgtggagtcggccaaagccattctcggaggaagcaaggtgcgcgtggaccagaaatgcaagtcctcggcccagatagatccgactcccgtgatcgtcacctccaacaccaacatgtgcgccgtgattgacgggaactcaacgaccttcgaacaccagcagccgttgcaagaccggatgttcaaatttgaactcacccgccgtctggatcatgactttgggaaggtcaccaagcgggaagtcaaagactttttccggtgggcaaaggatcacgtggttgaggtggagcatgaattctacgtcaaaaagggtggagccaagaaaagacccgcccctagtgacgcagatataagtgagcccaaacgggtgcgcgagtcagttgcgcagccatcgacgtcagacgcggaagcttcgatcaactacgcggacaggtaccaaaacaaatgttctcgtcacgtgggcatgaatctgatgctgtttccctgcagacaatgcgagagaatgaatcaaaattcaaatatctgcttcactcacggacagaaagactgtttagagtgctttcccgtgtcagaatctcaacctgtttctgtcgtcaaaaaggcgtatcagaaactgtgctacattcatcatatcatgggaaaggtgccagacgcttgcactgcctgcgatctggtcaatgtggatttggatgactgcatctctgaacaataaatgatttaaatcaggtatggctgccgatggttatcttccagattggctcgaggacactctctctgaaggaataagacagtggtggaagctcaaacctggcccaccaccaccaaagcccgcagagcggcataaggacgacagcaggggtcttgtgcttcctgggtacaagtacctcggacccttcaacggactcgacaagggagagccggtcaacgaggcagacgccgcggccctcgagcacgacaaggcctacgaccggcagctcgacagcggagacaacccgtacctcaagtacaaccacgccgacgcggagtttcaggagcgtcttaaagaagatacgtcttttgggggcaacctcggacgagcagtcttccaggcgaaaaagagggttcttgaacctctgggcctggttgaggaacctgttaagacggctccgggaaaaaagaggccggtagagcactctcctgcggagccagactcctcctcgggaaccggaaaagcgggccagcagcctgcaagaaaaagactgaatttcggtcagactggagacgcagactccgtacctgacccccagcctctcagacagccaccagcagcccccacaagtttgggatctactacaatggctacaggcagtggcgcaccaatggcagacaataacgagggtgccgatggagtgggtaattcctcaggaaattggcattgcgattcccaatggctgggcgacagagtcatcaccaccagcacccgaacctgggccctgcccacctacaacaaccacctttacaagcaaatctccagccaatcaggagcctcaaacgacaaccactactttggctacagcaccccctgggggtattttgacttcaacagattccactgccacttttcaccacgtgactggcaaagactcatcaacaacaactggggattccgacccaagagactcaacttcaagctctttaacattcaagtcaaagaggtcacgcagaatgacggtacgacgacgattgccaataaccttaccagcacggttcaggtgtttactgactcggagtaccagctcccgtacgtcctcggctcggcgcatcaaggatgcctcccgccgtttccagcggacgtcttcatggtcccacagtatggatacctcaccctgaacaacgggagtcaggcggtaggacgctcttccttttactgcctggagtactttccttctcagatgctgcgtactggaaacaactttcagttcagctacacttttgaagacgtgcctttccacagcagctacgctcacagccagagtttggatcggctgatgaatcctctgatcgaccagtacctgtattatctaaacagaacacaaacagctagtggaactcagcagtctcggctactgtttagccaagctggacccacaagcatgtctcttcaagctaaaaactggctgcctggaccgtgttatcgccagcagcgtttgtcaaagcaggcaaacgacaacaacaacagcaactttccctggactggagctaccaagtactacctcaatggcagagactctttggtgaacccgggcccggccatggccagccacaaggacgatgaagaaaagtttttccccatgcatggaaccctaatatttggtaaagaaggaacaaatgctaccaacgcggaattggaaaatgtcatgattacagatgaagaggaaatcaggaccaccaatcccgtggctacagagcagtacggatatgtgtcaaataatttgcaaaactcaaatactgctgcaagtactgaaactgtgaatcaccaaggagcattacctggtatggtgtggcaggatcgagacgtgtacctgcagggacccatttgggccaagattcctcacaccgatggacactttcatccttctccactgatgggaggttttggactcaaacacccgcctcctcagattatgatcaaaaacactcccgttccagccaatcctcccacaaacttcagttctgccaagtttgcttccttcatcacacagtattccacgggacaggtcagcgtggagatcgagtgggagctgcagaaggagaacagcaaacgctggaatcccgaaattcagtacacttccaactacaacaaatctgttaatgtggactttactgtggacactaatggtgtgtattcagagcctcgccccattggcaccagatacctgactcgtaatctgtaattgcttgttaatcaataaaccgtttaattcgtttcagttgaactttggtctctgcgaagggcgaattcgcggccgctaaatcaatcg

SEQ ID NO: 317 - protein, 734 aa, Adeno-associated virus
MAADGYLPDWLEDTLSEGIRQWWKLKPGPPPPKPAERHKDDSRGLVLPGYKYLGPFNGLDKGEPVNEADAAALEHDKAYDRQLDSGDNPYLKYNHADAEFQERLKEDTSFGGNLGRAVFQAKKRVLEPLGLVEEPVKTAPGKKRPVEHSPAEPDSSSGTGKAGQQPARKRLNFGQTGDADSVPDPQPLGQPPAAPTSLGSTTMATGSGAPMADNNEGADGVGNSSGNWHCDSQWLGDRVITTSTRTWALPTYNNHLYKQISSQSGASNDNHYFGYSTPWGYFDFNRFHCRFSPRDWQRLINNNWGFRPKRLNFKLFNIQVKEVTQNDGTTTIANNLTSTVQVFTDSEYQLPYVLGSAHQGCLPPFPADVFMVPQYGYLTLNNGSQAVGRSSFYCLEYFPSQMLRTGNNFQFSYTFEDVPFHSSYAHSQGLDRLMNPLIDQYLYYLNRTQTASGTQQSRLLFSQAGPTSMSLQAKNWLPGPCYRQQRLSKQANDNNNSNFPWTGATKYHLNGGDSLVNPGPAMASHKDDEEKFFPMHGTLIFGKEGTNATNAELENVMITDEEEIRTTNPVATEQYGYVSNNLQNSNTAASTETVNHQGALPGMVWQDRDVYLRGPIWAKIPHADGHFHPSPLMGGFGLKHPPPQIMIKNTPVPANPPTNFSSAKFASFITQYSTGQVSVEIEWELQKENSKRWNPEIQYTSNYNKSVNVDFTVDTNGVYSEPRPIGTRYLTRNL

SEQ ID NO: 318 - DNA, 3157 bp, Adeno-associated virus
ctcactaagggactagtcctgcaggtttaaacgaattcgcccttgctgcgtcaactggaccaatgagaactttcccttcaacgactgtgtcgacaagatggtgatttggtgggaggaggggaagatgaccgccaaggtcgtggagtcggccaaagccactctcggaggaagcaaggtgcgcgtggaccagaaacgcaagtcctcggcccagatagatccgactcccgtgatcgtcacctccaacaccaacatgtgcgccgtgattgacgggaactcaacgaccttcgaacaccagcagccgttgcaagaccgaatgttcaaatttgaactcacccgccgtctggatcatgacttcgggaaggtcaccaagcaggaagtcaaagactttttccggtgggcaaaggatcacgtggttgaggtggagcatgaattctacgtcaaaaagggtggagccaagaaaagacccgcccctagtgacgcagatataagtgagcccaaacgggtgcgcgagtcagttgcgcagccatcgacgtcagacgcggaagcttcgatcaactacgcggacaggtaccaaaacaaatgttctcgtcacgtgggcatgaatctgatgctgtttccctgcagacaatgcgagagaatgaatcaaaattcaaatatctgcttcactcacggacagaaagactgtttagagtgctttcccgtgtcagaatctcaacctgtttctgtcgtcaaaaaggcgtatcagaaactgtgctacattcatcatatcatgggaaaggtgccagacgcttgcactgcctgcgatctggtcaatgtggatttggatgactgcatctctgaacaataaatgatttaaatcaggtatggctgccgatggttatcttccagattggctcgaggacactctctctgaaggaataagacagtggtggaagctcaaacctggcccaccaccaccaaagcccgcagagcggcataaggacgacagcaggggtcttgtgcttcctgggtacaagtacctcggacccttcaacggactcgacaagggagagccggtcaacgaggcagacgccgcggctctcgagcacgacaaggcctacgaccggcagctcgacagcggagacaacccgtacctcaagtacaaccacgccgacgcggagtttcaggagcgtcttaaagaagatacgtcttttgggggcaacctcggacgagcagtcttccaggcgaaaaagagggttcttgaacctctgggcctggttgaggaacctgttaagacggctccgggaaaaaagaggccggtagagcactctcctgcggagccagactcctcctcgggaaccggaaaagcgggccagcagcctgcaagaaaaagactgaatttcggtcagactggagacgcagactccgtacctgacccccagcctctcggacagccaccagcagcccccacaagtttgggatctactacaatggctacaggcagtggcgcaccaatggcagacaataacgagggtgccgatggagtgggtaattcctcaggaaattggcattgcgattcccaatggctgggcgacagagtcatcaccaccagcacccgaacctgggccctgcccacctacaacaaccacctttacaagcaaatctccagccaatcaggagcctcaaacgacaaccactactttggctacagcaccccctgggggtattttgacttcaacagattccactgccgcttttcaccacgtgactggcaaagactcatcaacaacaactggggattccgacccaagagactcaacttcaagctctttaacattcaagtcaaagaggtcacgcagaatgacggtacgacgacgattgccaataaccttaccagcacggttcaggtgtttactgactcggagtaccagctcccgtacgtcctcggctcggcgcatcaaggatgcctcccgccgtttccagcggacgtcttcatggtcccacagtatggatacctcaccctgaacaacgggagtcaggcggtaggacgctcttccttttactgcctggagtactttccttctcagatgctgcgtactggaaacaactttcagttcagctacacttttgaagacgtgcctttccacagcagctacgctcacagccagggtttggatcggctgatgaatcctctgatcgaccagtacctgtattatctaaacagaacacaaacagctagtggaactcagcagtctcggctactgtttagccaagctggacccacaagcatgtctcttcaagctaaaaactggctgcctggaccgtgttatcgccagcagcgtttgtcaaagcaggcaaacgacaacaacaacagcaactttccctggactggagctaccaagtaccacctcaatggcggagactctttggtgaacccgggcccggccatggccagccacaaggacgatgaagaaaagtttttccccatgcatggaaccctaatatttggtaaagaaggaacaaatgctaccaacgcggaattggaaaatgtcatgattacagatgaagaggaaatcaggaccaccaatcccgtggctacagagcagtacggatatgtgtcaaataatttgcaaaactcaaatactgctgcaagtactgaaactgtgaatcaccaaggagcattacctggtatggtgtggcaggatcgagacgtgtacctgcggggacccatttgggccaagattcctcacgccgatggacactttcatccttctccactgatgggaggttttggactcaaacacccgcctcctcagattatgatcaaaaacactcccgttccagccaatcctcccacaaacttcagttctgccaagtttgcttccttcatcacacagtattccacgggacaggtcagcgtggagatcgagtgggagctgcagaaggagaacagcaaacgctggaatcccgaaattcagtacacttccaactacaacaaatctgttaatgtggactttactgtggacactaatggtgtgtattcagagcctcgccccattggcaccagatacctgactcgtaatctgtaattgcttgttaatcaataaaccgtttaattcgtttcagttgaactttggtctctgcgaagggcgaattcgcggccgctaaattcaattcg

SEQ ID NO: 319 - protein, 734 aa, Adeno-associated virus
MAADGYLPDWLEDTLSEGIRQWWKLKPGPPPPKPAERHKDDSRGLVLPGYKYLGPFNGLDKGEPVNEADAAALEHDKAYDRQLDSGDNPYLKYNHADAEFQERLKEDTSFGGNLGRAVFQAKKRVLEPLGLVEEPVKTAPGKKRPVEHSPAEPDSSSGTGKAGQQPARKRLNFGQTGDADSVPDPQPLGQPPAAPTSLGSTTMATGSGAPMADNNEGADGVGNSSGNWHCDSQWLGDRVITTSTRTWALPTYNNHLYKQISSQSGASNDNHYFGYSTPWGYFDFNRFHCHFSPRDWQRLINNNWGFRPKRLNFKLFNIQVKEVTQNDGTTTIANNLTSTVQVFTDSEYQLPYVLGSAHQGCLPPFPADVFMVPQYGYLTLNNGSQAVGRSSFYCLECFPSQMLRTGNNFQFSYTFEDVPFHSSYAHSQSLDRLMNPLIDQYLYYLNRTQTASGTQQSRLLFSQAGPTSMSLQAKNWLPGPCYRQQRLSKQANDNNNSNFPWTGATKYHLNGRDSLVNPGPAMASHKDDEEKFFPMHGTLIFGKEGTNATNAELENVMITDEEEIRTTNPVATEQYGYVSNNLQNSNTAASTETVNHQGALPGMVWQDRDVYLQGPIWAKIPHTDGHFHPSPLMGGFGLKHPPPQIMIKNTPVPANPPTNFSSAKFASFITQYSTGQVSVEIEWELQKENSKRWNPEIQYTSNYNKSVNVDFTVDTNGVYSEPRPIGTRYLTRNL

SEQ ID NO: 320 - DNA, 2208 bp, Adeno-associated virus
atggctgccgatggttatcttccagattggctcgaggacactctctctgaaggaataagacagtggtggaagctcaaacctggcccaccaccaccaaagcccgcagagcggcataaggacgacagcaggggtcttgtgcttcctggatacaagtacctcggacccttcaacggactcgacaagggagagccggtcaacgaggcagacgccgcggccctcgagcacgacaaggcctacgaccggcagctcgacagcggagacaacccgtacctcaagtacaaccacgccgacgcggagtttcaggagcgccttaaagaagatacgtcttttgggggcaacctcggacgagcagtcttccaggcgaaaaagagggttcttgaacctctgggcctggttgaggaacctgttaagacggctccgggaaaaaagaggccggtagagcactctcctgtggagccagactcctcctcgggaaccggaaaagcgggcaaccagcctgcaagaaaaagattgaatttcggtcagactggagacgcagactccgtacctgacccccagcctctcggacagccaccagcatccccctctggtctgggaactaatacgatggctacaggcagtggcgcaccaatggcagacaataacgagggcgccgacggagtgggtaattcctcgggaaattggcattgcgattccacatggatgggcgacagagtcgtcaccaccagcacccgcacctgggccctgcccacctacaacaaccacctctacaagcagatttccagccaatcaggagccagcaacgacaaccactactttggctacagcaccccttgggggtattttgacttcaacagattccactgccacttttcgccacgcgactggcagagactcatcaacaacaactggggattccggcccaaaagactcaacttcaagctgtttaacattcaagtcaaggaggtcacgcagaatgacggtacgacgacgattgccaataaccttaccagcacggttcaggtgtttactgacttggagtaccagctcccgtacgtcctcggctcggcgcatcaaggatgcctcccgccgttcccagcagacgtcttcatggtgccacagtatggatacctcaccctgaacaacgggagtcaggcggtaggacgctcttccttttactgcctggagtactttccttctcagatgcttcgcaccggaaacaactttaccttcagctacacttttgaagacgttcctttccacagcagctacgctcacagtcaaagtctggaccgtctcatgaatcctctcatcgaccagtacctgtattacttgagcagaacaaacactccaagcggaaccactacgcagtccaggcttcagttttctcaggccggagcgagtgacattcgggaccagtctaggaactggcttcctggaccctgttaccgccagcagcgagtatcaaagacagctgcggataacaacaacagtgaatactcgtggactggagctaccaagtaccacctcaatggcagagactctctggtgaatccgggcccggccatggccagccacaaggacgatgaagaaaagttttttcctcaaagcggggttctcatctttgggaagcaaggctcagagaaaacaaatgtggacattgaaaaggtcatgattacagacgaagaggaaatcaggaccaccaatcccgtggctacggagcagtatggttctgtatctaccaacctccagagcggcaacacacaagcagctacctcagatgtcaacacacaaggcgttcttccaggcatggtctggcaggacagagacgtgtacctgcaggggcccatctgggcaaaaattccacacacggacggacattttcacccctctcccctcatgggcggatttggacttaaacaccctcctccacagattctcattaagaataccccggtacctgcgaatccttcgaccaccttcagcgcggcaaagtttgcttccttcatcacacagtattccacggggcaggtcagcgtggagatcgagtgggagctgcagaaggagaacagcaaacgctggaatcccgaaattcagtacacttccaactacaacaaatctgttaatgtggactttactgtggacactaatggggtgtattcagagcctcgccctattggcaccagatacctgactcgtaatctgtaa

SEQ ID NO: 321 - DNA, 3159 bp, Adeno-associated virus
gattgatttagcggccgcgaattcgcccttgctgcgtcaactggaccaatgagaactttcccttcaacgattgcgtcgacaagatggtgatctggtgggaggagggaaagatgaccgccaaggtcgtggagtcggccaaagccattctcggaggaagcaaggtgcgtgtggaccaaaagtgcaagtcttcggcccagatcgacccgactcccgtgatcgtcacctccaacaccaacatgtgcgccgtgattgatggaaactcaacgaccttcgagcaccagcagccgttgcaagaccggatgttcaaatttgaacttacccgccgtctggatcatgactttggaaaggtcaccaagcaggaagtgaaagactttttccggtgggcaaaggatcacgtggttgaggtggagcatgagttctacgtcaaaaagggtggagccaaaaaaagacccgcccccagtgacgcagatataagtgagcccaaacgggcgcgcgagtcagttgcgcagccatcgacgtcagacgcggaagcttcgatcaactacgcggacaggtaccaaaacaaatgttctcgtcacgtgggcatgaatctgatgctgtttccctgcagacaatgcgagagaatgaatcagaattcaaatatctgcttcactcacggacagaaagactgtccatagtgctttcccgtgtcagaatctcaacccgtttctgtcgtcaaaaaggcgtatcagaaactgtgctacattcatcacatcatgggaaaggtgccagacgcttgcactgcttgcgacctggtcaatgtggatttggatgactgcatctctgaacaataaatgatttaaatcaggtatggctgccgatggttatcttccagattggctcgaggacactctctctgaaggaataagacagtggtggaagctcaaacctggcccaccaccaccaaagcccgcagagcggcataaggacgacagcaggggtcttgtgcttcctggatacaagtacctcggacccttcaacggactcgacaagggagagccggtcaacgaggcagacgccgcggccctcgagcacgacaaggcctacgaccggcagctcgacagcggagacaacccgtacctcaagtacaaccacgccgacgcggagtttcaggagcgccttaaagaagatacgtcttttgggggcaacctcggacgagcagtcttccaggcgaaaaagagggttcttgaacctctgggcctggttgaggaacctgttaagacggctccgggaaaaaagaggccggtagagcactctcctgtggagccagactcctcctcgggaaccggaaaagcgggcaaccagcctgcaagaaaaagattgaatttcggtcagactggagacgcagactccgtacctgacccccagcctctcggacagccaccagcatccccctctggtctgggaactaatacgatggctacaggcagtggcgcaccaatggcagacaataacgagggcgccgacggagtgggtaattcctcgggaaattggcattgcgattccacatggatgggcgacagagtcgtcaccaccagcacccgcacctgggccctgcccacctacaacaaccacctctacaagcagatttccagccaatcaggagccagcaacgacaaccactactttggctacagcaccccttgggggtattttgacttcaacagattccactgccacttttcgccacgcgactggcagagactcatcaacaacaactggggattccggcccaaaagactcaacttcaagctgtttaacattcaagtcaaggaggtcacgcagaatgacggtacgacgacgattgccaataaccttaccagcacggttcaggtgtttactgacttggagtaccagctcccgtacgtcctcggctcggcgcatcaaggatgcctcccgccgttcccagcagacgtcttcatggtgccacagtatggatacctcaccctgaacaacgggagtcaggcggtaggacgctcttccttttactgcctggagtactttccttctcagatgcttcgcaccggaaacaactttaccttcagctacacttttgaagacgttcctttccacagcagctacgctcacagtcaaagtctggaccgtctcatgaatcctctcatcgaccagtacctgtattacttgagcagaacaaacactccaagcggaaccactacgcagtccaggcttcagttttctcaggccggagcgagtgacattcgggaccagtctaggaactggcttcctggaccctgttaccgccagcagcgagtatcaaagacagctgcggataacaacaacagtgaatactcgtggactggagctaccaagtaccacctcaatggcagagactctctggtgaatccgggcccggccatggccagccacaaggacgatgaagaaaagttttttcctcaaagcggggttctcatctttgggaagcaaggctcagagaaaacaaatgtggacattgaaaaggtcatgattacagacgaagaggaaatcaggaccaccaatcccgtggctacggagcagtatggttctgtatctaccaacctccagagcggcaacacacaagcagctacctcagatgtcaacacacaaggcgttcttccaggcatggtctggcaggacagagacgtgtacctgcaggggcccatctgggcaaaaattccacacacggacggacattttcacccctctcccctcatgggcggatttggacttaaacaccctcctccacagattctcattaagaataccccggtacctgcgaatccttcgaccaccttcagcgcggcaaagtttgcttccttcatcacacagtattccacggggcaggtcagcgtggagatcgagtgggagctgcagaaggagaacagcaaacgctggaatcccgaaattcagtacacttccaactacaacaaatctgttaatgtggactttactgtggacactaatggggtgtattcagagcctcgccctattggcaccagatacctgactcgtaatctgtaattgcttgttaatcaataaaccgtttaattcgtttcagttgaactttggtctctgcgaagggcgaattcgtttaaacctgcaggactagtccctttagtgagg

SEQ ID NO: 322 - protein, 735 aa, Adeno-associated virus
MAADGYLPDWLEDTLSEGIRQWWKLKPGPPPPKPAERHKDDSRGLVLPGYKYLGPFNGLDKGEPVNEADAAALEHDKAYDRQLDSGDNPYLKYNHADAEFQERLKEDTSFGGNLGRAVFQAKKRVLEPLGLVEEPVKTAPGKKRPVEHSPVEPDSSSGTGKAGNQPARKRLNFGQTGDADSVPDPQPLGQPPASPSGLGTNTMATGSGAPMADNNEGADGVGNSSGNWHCDSTWMGDRVVTTSTRTWALPTYNNHLYKQISSQSGASNDNHYFGYSTPWGYFDFNRFHCHFSPRDWQRLINNNWGFRPKRLNFKLFNIQVKEVTQNDGTTTIANNLTSTVQVFTDLEYQLPYVLGSAHQGCLPPFPADVFMVPQYGYLTLNNGSQAVGRSSFYCLEYFPSQMLRTGNNFTFSYTFEDVPFHSSYAHSQSLDRLMNPLIDQYLYYLSRTNTPSGTTTQSRLQFSQAGASDIRDQSRNWLPGPCYRQQRVSKTAADNNNSEYSWTGATKYHLNGRDSLVNPGPAMASHKDDEEKFFPQSGVLIFGKQGSEKTNVDIEKVMITDEEEIRTTNPVATEQYGSVSTNLQSGNTQAATSDVNTQGVLPGMVWQDRDVYLQGPIWAKIPHTDGHFHPSPLMGGFGLKHPPPQILIKNTPVPANPSTTFSAAKFASFITQYSTGQVSVEIEWELQKENSKRWNPEIQYTSNYNKSVNVDFTVDTNGVYSEPRPIGTRYLTRNL

SEQ ID NO: 323 - DNA, 2205 bp, Adeno-associated virus
atggctgccgatggttatcttccagattggctcgaggacactctctctgaaggaataagacagtggtggaagctcaaacctggcccaccaccaaagcccgcagagcggcataaggacgacagcaggggtcttgtgcttcctggatacaagtacctcggacccttcaacggactcgacaagggagagccggtcaacgaggcagacgccgcggccctcgagcacgacaaggcctacgaccggcagctcgacagcggagacaacccgtacctcaagtacaaccacgccgacgcggagtttcaggagcgccttaaagaagatacgtcttttgggggcaacctcggacgagcagtcttccaggcgaaaaagagggttcttgaacctctgggcctggttgaggaacctgttaagacggctccgggaaaaaagaggcccgtagagcactctcctgtggagccagactcctcctcgggaaccggaaaagcgggcaaccagcctgcaagaaaaagattgaatttcggtcagactggagacgcagactccgtacctgacccccagcctctcggacagccaccagcagccccctctggtctgggaactaatacgatggctacaggcagtggcgcaccaatggcagacaataacgagggcgccgacggagtgggtaattcctcgggagattggcattgcgattccacatggatgggcgacagagtcatcaccaccagcacccgcacctgggccctgcccacctacaacaaccacctctacaagcagatttccagccaatcaggagccagcaatgacaaccactactttggctacagcaccccttgggggtattttgacttcaacagattccactgccacttttcgccacgcgactggcagagactcatcaacaacaactggggattccggcccaaaagactcaacctcaagctgtttaacattcaagtcaaggaggtcacgcagaatgacggtacgacgacgattgccaataaccttaccagcacggttcaggtgtttactgacttggagtaccagctcccgtacgtcctcggctcggcgcatcaaggatgcctcccgccgttcccagcagacgtcttcatggtgccacagtatggatacctcaccctgaacaacgggagtcaggcggtaggacgctcttccttttactgcctggagtactttccttctcagatgcttcgtaccggaaacaactttaccttcagctacacttttgaagacgttcctttccacagcagctacgctcacagtcaaagtctggaccgtctcatgaatcctctcatcgaccagtacctgtattacttgagcagaacaaacactccaagcggaaccactacgcagtccaggcttcagttttctcaggccggagcgagtgacattcgggaccagtctaggaactggcttcctggaccctgttaccgccagcagcgagtatcaaagacagctgcggataacaacaacggtgaatactcgtggactggagctaccaagtaccacctcaatggcagagactctctggtgaatccgggcccggccatggccagccacaaggacgatgaagaaaagttttttcctcaaagcggggttctcatctttgggaagcaaggctcagagaaaacaaatgtggacattgaaaaggtcatgattacagacgaagaggaaatcaggaccaccaatcccgtggctacggagcagtatggttctgtatctaccaacctccagagcggcaacacacgagcagctacctcagatgtcaacacacaaggcgttcttccaggcatggtctggcaggacagagacgtgtacctgcaggggcccatctgggcaaaaattccacacacggacggacattttcacccctctcccctcatgggcggatttggacttaaacaccctcctccacagattctcattaagaataccccggtacctgcgaatccttcgaccaccttcagcgcggcaaagtttgcttccttcatcacacagtattccacggggcaggtcagcgtggagatcgagtgggagctgcagaaggagaacagcaaacgctggaatcccgaaattcagtacacttccaactacaacaaatctgttaatgtggactttactgtggacactaatggggtgtattcagagcctcgccctattggcaccagatacctgactcgtaatctgtaa

SEQ ID NO: 324 - DNA, 3156 bp, Adeno-associated virus
cgattgaatttagcggccgcgaattcgcccttgctgcgtcaacggaccaatgagaactttcccttcaacgattgcgtcgacaagatggtgatctggtgggaggagggaaagatgaccgccaaggtcgtggagtcggccaaagccattctcggaggaagcaaggtgcgtgtggaccaaaagtgcaagtcttcggcccagatcgacccgactcccgtgatcgtcacctccaacaccaacatgtgcgccgtgattgatggaaactcaacgaccttcgagcaccagcagccgttgcaagaccggatgttcaaatttgaacttacccgccgtctggatcatgactttggaaaggtcaccaagcaggaagtgaaagactttttccggtgggcaaaggatcacgtggttgaggtggagcatgagttctacgtcaaaaagggtggagccaaaaaaagacccgcccccagtgacgcagatataagtgagcccaaacgggcgcgcgagtcagttgcgcagccatcgacgtcagacgcggaagcttcgatcaactacgcggacaggtaccaaaacaaatgttctcgtcacgtgggcatgaatctgatgctgtttccctgcagacaatgcgagcgaatgaatcagaattcaaatatctgcttcactcacggacagaaagactgtttagagtgctttcccgtgtcagaatctcaacccgtttctgtcgtcaaaaaggcgtatcagaaactgtgctacattcatcacatcatgggaaaggtgccagacgcttgcactgcttgcgacctggtcaatgtggatttggatgactgcatctctgaacaataaatgatttaaatcaggtatggctgccgatggttatcttccagattggctcgaggacactctctctgaaggaataagacagtggtggaagctcaaacctggcccaccaccaaagcccgcagagcggcataaggacgacagcaggggtcttgtgcttcctggatacaagtacctcggacccttcaacggactcgacaagggagagccggtcaacgaggcagacgccgcggccctcgagcacgacaaggcctacgaccggcagctcgacagcggagacaacccgtacctcaagtacaaccacgccgacgcggagtttcaggagcgccttaaagaagatacgtcttttgggggcaacctcggacgagcagtcttccaggcgaaaaagagggttcttgaacctctgggcctggttgaggaacctgttaagacggctccgggaaaaaagaggcccgtagagcactctcctgtggagccagactcctcctcgggaaccggaaaagcgggcaaccagcctgcaagaaaaagattgaatttcggtcagactggagacgcagactccgtacctgacccccagcctctcggacagccaccagcagccccctctggtctgggaactaatacgatggctacaggcagtggcgcaccaatggcagacaataacgagggcgccgacggagtgggtaattcctcgggagattggcattgcgattccacatggatgggcgacagagtcatcaccaccagcacccgcacctgggccctgcccacctacaacaaccacctctacaagcagatttccagccaatcaggagccagcaatgacaaccactactttggctacagcaccccttgggggtattttgacttcaacagattccactgccacttttcgccacgcgactggcagagactcatcaacaacaactggggattccggcccaaaagactcaacctcaagctgtttaacattcaagtcaaggaggtcacgcagaatgacggtacgacgacgattgccaataaccttaccagcacggttcaggtgtttactgacttggagtaccagctcccgtacgtcctcggctcggcgcatcaaggatgcctcccgccgttcccagcagacgtcttcatggtgccacagtatggatacctcaccctgaacaacgggagtcaggcggtaggacgctcttccttttactgcctggagtactttccttctcagatgcttcgtaccggaaacaactttaccttcagctacacttttgaagacgttcctttccacagcagctacgctcacagtcaaagtctggaccgtctcatgaatcctctcatcgaccagtacctgtattacttgagcagaacaaacactccaagcggaaccactacgcagtccaggcttcagttttctcaggccggagcgagtgacattcgggaccagtctaggaactggcttcctggaccctgttaccgccagcagcgagtatcaaagacagctgcggataacaacaacggtgaatactcgtggactggagctaccaagtaccacctcaatggcagagactctctggtgaatccgggcccggccatggccagccacaaggacgatgaagaaaagttttttcctcaaagcggggttctcatctttgggaagcaaggctcagagaaaacaaatgtggacattgaaaaggtcatgattacagacgaagaggaaatcaggaccaccaatcccgtggctacggagcagtatggttctgtatctaccaacctccagagcggcaacacacgagcagctacctcagatgtcaacacacaaggcgttcttccaggcatggtctggcaggacagagacgtgtacctgcaggggcccatctgggcaaaaattccacacacggacggacattttcacccctctcccctcatgggcggatttggacttaaacaccctcctccacagattctcattaagaataccccggtacctgcgaatccttcgaccaccttcagcgcggcaaagtttgcttccttcatcacacagtattccacggggcaggtcagcgtggagatcgagtgggagctgcagaaggagaacagcaaacgctggaatcccgaaattcagtacacttccaactacaacaaatctgttaatgtggactttactgtggacactaatggggtgtattcagagcctcgccctattggcaccagatacctgactcgtaatctgtaattgcttgttaatcaataaaccgtttaattcgtttcagttgaactttggtctctgcgaagggcgaattcgtttaaacctgcaggactagtccctttagtgag

SEQ ID NO: 325 - protein, 734 aa, Adeno-associated virus
MAADGYLPDWLEDTLSEGIRQWWKLKPGPPPKPAERHKDDSRGLVLPGYKYLGPFNGLDKGEPVNEADAAALEHDKAYDRQLDSGDNPYLKYNHADAEFQERLKEDTSFGGNLGRAVFQAKKRVLEPLGLVEEPVKTAPGKKRPVEHSPVEPDSSSGTGKAGNQPARKRLNFGQTGDADSVPDPQPLGQPPAAPSGLGTNTMATGSGAPMADNNEGADGVGNSSGDWHCDSTWMGDRVITTSTRTWALPTYNNHLYKQISSQSGASNDNHYFGYSTPWGYFDFNRFHCHFSPRDWQRLINNNWGFRPKRLNLKLFNIQVKEVTQNDGTTTIANNLTSTVQVFTDLEYQLPYVLGSAHQGCLPPFPADVFMVPQYGYLTLNNGSQAVGRSSFYCLEYFPSQMLRTGNNFTFSYTFEDVPFHSSYAHSQSLDRLMNPLIDQYLYYLSRTNTPSGTTTQSRLQFSQAGASDIRDQSRNWLPGPCYRQQRVSKTAADNNNGEYSWTGATKYHLNGRDSLVNPGPAMASHKDDEEKFFPQSGVLIFGKQGSEKTNVDIEKVMITDEEEIRTTNPVATEQYGSVSTNLQSGNTRAATSDVNTQGVLPGMVWQDRDVYLQGPIWAKIPHTDGHFHPSPLMGGFGLKHPPPQILIKNTPVPANPSTTFSAAKFASFITQYSTGQVSVEIEWELQKENSKRWNPEIQYTSNYNKSVNVDFTVDTNGVYSEPRPIGTRYLTRNL

SEQ ID NO: 326 - DNA, 2208 bp, Adeno-associated virus
atggctgccgatggttatcttccagattggctcgaggacactctctctgaaggaataagacagtggtggaagctcaaacctggcccaccaccaccaaagcccgcagagcggcataaggacgacagcaggggtcttgtgcttcctgggtacaagtacctcggacccttcaacggactcgacaagggagagccggtcaacgaggcagacgccgcggccctcgagcacgacaaggcctacgaccggcagctcgacagcggagacaacccgtacctcaagtacgaccacgccgacgcggagtttcaggagcgccttaaagaagatacgtcttttgggggcaacctcggacgagcagtcttccaggcaaaaaagagggttcttgaacctctgggcctggttgaggagcctgttaagacggctccgggaaaaaagaggccggtagagcactctcctgtggagccagactcctcctcgggaaccggaaaagcgggcaaccagcctgcaagaaagagattgaatttcggtcagactggagacgcagactccgtacctgacccccagcctctcggacagccaccagcagccccctctggtctgggaactaatacgatggctacaggcagtggcgcaccaatggcagacaataacgatggcgccgacggagtgggtaattcctcgggaaattggcattgcgattccacatggatgggcgacagagtcatcaccaccagcacccgaacctgggctctgcccacctacaacaaccatctgtacaagcagatttccagccaatcaggagccagcaacgacaaccactactttggctacagcaccccttgggggtattttgacttcaacagattccactgccacttttcaccacgtgactggcaaagactcatcaacaacaactggggattccggcccaagagactcaacttcaagctctttaacattcaagtcagagaggtcacgcagaatgatggtacgacgacgattgccaataaccttaccagcacggttcaggtgtttactgactcggagtaccagctcccgtacgtcctcggctcggcgcatcaaggatgcctcccgccgttcccagcagacgtcttcatggtgccacagtatggatacctcaccctgaacaacgggagtcaggcagtaggacgctcttcattttactgcctggagtacttcccttctcagatgctgcgtaccggaaacaactttaccttcagctacacctttgaggatgttcctttccacagcagctacgctcacagccagagtttggaccgtctcatgaatcctctcatcgaccagtacctgtattacttgagcagaacaaacactccaagcggaaccaccacgcagtccaggcttcagttttctcaggccggagcgagtgacattcgggatcagtctaggaactggcttcctggaccctgttaccgccagcagcgagtatcaaagacatctgcggacaacaacaacagtgaatactcgtggattggagctaccaagtaccacctcaatggcagagactctctggtgaatccgggcccggcaatggccagccacaaggacgatgaagaaaagttttttcctcagagcggggttctcatctttggaaaacaaggatcagagaaaacaaatgtggacattgaaaaggtcatgattacagacgaagaggaaatcagaaccaccaatcccgtggccacggagcagtatggttctgtatctaccaacctccagagcggcaacacacaagcatctactgcagatgtcaacacacaaggcgttcttccaggcatggtctggcaggacagagacgtgtacctgcaggggcctatctgggcaaagattccgcacacggacggacattttcacccctctcccctcatgggcggattcggacttaaacaccctcctccacagattctcatcaaaaacaccccggtacctgcgaatccttcgaccaccttcagtgcggcaaagtttgcttccttcatcacacagtattccacggggcgggtcagcgtggagatcgagtgggagctacagaaggagaacagcaaacgctggaatcccgagatccagtacacttccaactacaacaaatctgttaatgtggactttactgtggacactaatggtgtgtattcagagcctcgccccattggcaccagatacctgactcgtaatctgtaa

SEQ ID NO: 327 - protein, 735 aa, Adeno-associated virus
MAADGYLPDWLEDTLSEGIRQWWKLKPGPPPPKPAERHKDDSRGLVLPGYKYLGPFNGLDKGEPVNEADAAALEHDKAYDRQLDSGDNPYLKYDHADAEFQERLKEDTSFGGNLGRAVFQAKKRVLEPLGLVEEPVKTAPGKKRPVEHSPVEPDSSSGTGKAGNQPARKRLNFGQTGDADSVPDPQPLGQPPAAPSGLGTNTMATGSGAPMADNNDGADGVGNSSGNWHCDSTWMGDRVITTSTRTWALPTYNNHLYKQISSQSGASNDNHYFGYSTPWGYFDFNRFHCHFSPRDWQRLINNNWGFRPKRLNFKLFNIQVREVTQNDGTTTIANNLTSTVQVFTDSEYQLPYVLGSAHQGCLPPFPADVFMVPQYGYLTLNNGSQAVGRSSFYCLEYFPSQMLRTGNNFTFSYTFEDVPFHSSYAHSQSLDRLMNPLIDQYLYYLSRTNTPSGTTTQSRLQFSQAGASDIRDQSRNWLPGPCYRQQRVSKTSADNNNSEYSWIGATKYHLNGRDSLVNPGPAMASHKDDEEKFFPQSGVLIFGKQGSEKTNVDIEKVMITDEEEIRTTNPVATEQYGSVSTNLQSGNTQASTADVNTQGVLPGMVWQDRDVYLQGPIWAKIPHTDGHFHPSPLMGGFGLKHPPPQILIKNTPVPANPSTTFSAAKFASFITQYSTGRVSVEIEWELQKENSKRWNPEIQYTSNYNKSVNVDFTVDTNGVYSEPRPIGTRYLTRNL

SEQ ID NO: 328 - DNA, 2217 bp, Adeno-associated virus
atggctgccgatggttatcttccagattggctcgaggacaacctctctgagggcattcgcgagtggtgggacttgaaacctggagccccgaaacccaaagccaaccagcaaaagcaggacgacggccggggtctggtgcttcctggctacaagtacctcggacccttcaacggactcgacaagggggagcccgtcaacgcggcggacgcagcggccctcgagcacgacaaggcctacgaccagcagctcaaagcgggtgacaatccgtacctgcggtataaccacgccgacgccgagtttcaggagcgtctgcaagaagatacgtcttttgggggcaacctcgggcgagcagtcttccaggccaagaagcgggttctcgaacctctcggtctggttgaggaaggcgctaagacggctcctggaaagaagagaccggtagagccatcaccccagcgttctccagactcctctacgggcatcggcaagacaggccagcagcccgcgaaaaagagactcaactttgggcagactggcgactcagagtcagtgcccgaccctcaaccaatcggagaaccccccgcaggcccctctggtctgggatctggtacaatggctgcaggcggtggcgctccaatggcagacaataacgaaggcgccgacggagtgggtagttcctcaggaaattggcattgcgattccgcatggctgggcgacagagtcatcaccaccagcacccgaccctgggccctccccacctacaacaaccacctctacaagcaaatctccaacgggacatcgggaggaagcaccaacgacaacacctacttcggctacagcaccccctgggggtattttgactttaacagattccactgccacttctcaccacgtgactggcagcgactcatcaacaacaactggggattccggcccaagagactcaacttcaagctcttcaacatccaggtcaaggaggtcacgcagaatgaaggcaccaagaccatcgccaataaccttaccagcacgattcaggtctttacggactcggaataccagctcccgtacgtcctcggctctgcgcaccagggctgcccgcctccgttcccggcggacgtcttcatgattcctcagtacgggtacctgactctgaacaacggcagtcaggccgtgggccgttcctccttctactgcctggagtactttccttctcaaatgcggagaacgggcaacaactttgagttcagctaccagtttgaggacgtgccttttcacagcagctacgcgcatagccaaagcctggaccggctgatgaaccccctcatcgaccagtacctgtactacctgtctcggactcagtccacgggaggtaccgcaggaactcagcagttgctattttctcaggccgggcctaataacatgtcggctcaggccaaaaactggctacccgggccctgctaccggcagcaacgcgtctccacgacactgtcgcaaaataacaacagcaactttgcttggaccggtgccaccaagtatcatctgaatggcagagactctctggtaaatcccggtgtcgctatggcaacgcacaaggacgacgaagagcgattttttccatccagcggagtcttgatgtttgggaaacagggagctggaaaagacaacgtggactatagcagcgttatgctaaccagtgaggaagaaatcaaaaccaccaacccagtggccacagaacagtacggcgtggtggccgataacctgcaacagcaaaacgccgctcctattgtaggggccgtcaacagtcaaggagccttacctggcatggtctggcagaaccgggacgtgtacctgcagggtcctatctgggccaagattcctcacacggacggcaactttcatccttcgccgctgatgggaggctttggactgaaacacccgcctcctcagatcctgattaagaatacacctgttcccgcggatcctccaactaccttcagtcaagccaagctggcgtcgttcatcacgcagtacagcaccggacaggtcagcgtggaaattgaatgggagctgcagaaagagaacagcaagcgctggaacccagagattcagtatacttccaactactacaaatctacaaatgtggactttgctgtcaatactgagggtacttattcagagcctcgccccattggcacccgttacctcacccgtaacctgtaa

SEQ ID NO: 329 - protein, 738 aa, Adeno-associated virus
MAADGYLPDWLEDNLSEGIREWWDLKPGAPKPKANQQKQDDGRGLVLPGYKYLGPFNGLDKGEPVNAADAAALEHDKAYDQQLKAGDNPYLRYNHADAEFQERLQEDTSFGGNLGRAVFQAKKRVLEPLGLVEEGAKTAPGKKRPVEPSPQRSPDSSTGIGKTGQQPAKKRLNFGQTGDSESVPDPQPIGEPPAGPSGLGSGTMAAGGGAPMADNNEGADGVGSSSGNWHCDSAWLGDRVITTSTRPWALPTYNNHLYKQISNGTSGGSTNDNTYFGYSTPWGYFDFNRFHCHFSPRDWQRLINNNWGFRPKRLNFKLFNIQVKEVTQNEGTKTIANNLTSTIQVFTDSEYQLPYVLGSAHQGCPPPFPADVFMIPQYGYLTLNNGSQAVGRSSFYCLEYFPSQMRRTGNNFEFSYQFEDVPFHSSYAHSQSLDRLMNPLIDQYLYYLSRTQSTGGTAGTQQLLFSQAGPNNMSAQAKNWLPGPCYRQQRVSTTLSQNNNSNFAWTGATKYHLNGRDSLVNPGVAMATHKDDEERFFPSSGVLMFGKQGAGKDNVDYSSVMLTSEEEIKTTNPVATEQYGVVADNLQQQNAAPIVGAVNSQGALPGMVWQNRDVYLQGPIWAKIPHTDGNFHPSPLMGGFGLKHPPPQILIKNTPVPADPPTTFSQAKLASFITQYSTGQVSVEIEWELQKENSKRWNPEIQYTSNYYKSTNVDFAVNTEGTYSEPRPIGTRYLTRNL

SEQ ID NO: 330 - protein, 735 aa, Adeno-associated virus
MAADGYLPDWLEDTLSEGIRQWWKLKPGPPPPKPAERHKDDSRGLVLPGYKYLGPFNGLDKGEPVNEADAAALEHDKAYDRQLDSGDNPYLKYNHADAEFQERLKEDTSFGGNLGRAVFQAKKRVLEPLGLVEEPVKTAPGKKRPVEHSPVEPDSSSGTGKAGQQPARKRLNFGQTGDADSVPDPQPLGQPPAAPSGLGSTTMATGSGAPMADNNEGADGVGNSSGNWHCDSQWLGDRVITTSTRTWALPTYNNHLYKQISSQSGASNDNHYFGYSTPWGYFDFNRFHCHFSPRDWQRLINNNWGFRPKRLNFKLFNIQVKEVTQNDGTTTIANNLTSTVQVFTDSEYQLPYVLGSAHQGCLPPFPADVFMVPQYGYLTLNNGSQAVGRSSFYCLEYFPSQMLRTGNNFQFSYTFEDVPFHSSYAHSQSLDRLMNPLVDQYLYYLNKTQTNSGTLQQSRLLFSQAGPTNMSLQAKNWLPGPCYRQQRLSKQANDNNNSNFPWTAATKYHLNGRDSLVNPGPAMASHKDDEEKFFPMHGTLIFGKQGTNANDADLENVMITDEEEIRTTNPVATEQYGTVSNNLQNSNTGPTTGTVNHQGALPGMVWQDRDVYLQGPIWAKIPHTDGHFHPSPLMGGFGLKHPPPQIMIKNTPVPANPPTNFSSAKFASFITQYSTGQVSVEIEWELQKENSKRWNPEIQYTSNYNKSVNVDFTVDTNGVYSEPRPIGTRYLTRNL

SEQ ID NO: 331 - DNA, 3158 bp, Adeno-associated virus
gattgaatttagcggccgcgaattcgcccttgctgcgtcaactggaccaatgagaactttcctttcaatgattgcgtcgacaagatggtgatctggtgggaggagggaaagatgaccgccaaggtcgtggagtcggccaaagccattctcggaggaagcaaggtgcgcgcggaccagaaatgcaagtcctcggcccagatagacccgactcccgtgattgtcacctccaacaccaacatgtgcgccgtgattgacgggaactcaacgaccttcgaacaccagcagccgttgcaagaccggatgttcaaatttgaactcacccgccgtctggatcatgactttgggaaggtcaccaagcaggaagtcaaagactttttccggtgggcaaaggatcacgtggttgaggtggagcatgaattctacgtcaaaaagggtggagctaagaaaagacccgcccccagtgacgcagatataagtgagcccaaacgggcgcgcgagtcagttgcgcagccatcgacgtcagacgcggaagcttcgatcaactacgcgggcaggtaccaaaacaaatgttctcgtcacgtgggcatgaatctgatgctgtttccctgcagacaatgcgagagaatgaatcagaattcaaatatctgcttcactcacggacagaaagactgtttagagtgctttcccgtgtcagaatctcaacccgtttctgtcgtcaaaaaggcgtatcagaaactttgctacattcatcatatcatgggaaaggtgccagacgcttgcactgcctgcgatctggtcaatgtggatttggatgactgcatctctgaacaataaatgatttaaatcaggtatggctgccgatggttatcttccagattggctcgaggacactctctctgaaggaataagacagtggtggaagctcaaacctggcccaccaccaccaaagcccgcagagcggcataaggacgacagcaggggtcttgtgcttcctgggtacaagtacctcggacccttcaacggactcgacaagggggagccggtcaacgaggcagacgccgcggccctcgagcacgacaaggcctacgaccggcagctcgacagcggagacaacccgtacctcaagtacaaccacgccgacgcggagtttcaggagcgccttaaagaagatacgtcttttgggggcaacctcggacgagcagtcttccaggcaaaaaagagggttcttgaacctctgggcctggttgaggaacctgttaaaacggctccgggaaaaaagaggccggtagagcactctcctgtggagccagactcctcctcgggaaccggaaaagcgggccagcagcctgcaagaaaaagattgaatttcggtcagactggagacgcagactccgtacctgacccccagcctctcggacagccaccagcagccccctctggtctgggatctactacaatggctacaggcagtggcgcaccaatggcagacaataacgagggtgccgatggagtgggtaattcctcgggaaattggcattgcgattcccaatggctgggcgacagagtcatcaccaccagcacccgcacctgggccctgcccacctacaacaaccacctctacaagcaaatctccagccaatcaggagcctcaaacgacaaccactactttggctacagcaccccctgggggtattttgacttcaacagattccactgccacttttcaccacgtgactggcaaagactcatcaacaacaactggggattccgacccaagagactcaacttcaagctctttaacattcaagtcaaagaggtcacgcagaatgacggtacgacgacgattgccaataaccttaccagcacggttcaggtgtttactgactcggagtaccagctcccgtacgtcctcggctcggcgcatcaaggatgcctcccgccgtttccagcggacgtcttcatggtcccacagtatggatacctcaccctgaacaacgggagtcaggcagtaggacgctcttcattttactgcctggagtactttccttctcagatgctgcgtaccggaaacaactttcaattcagctacacttttgaagacgtgcctttccacagcagctacgctcacagccagagtctggatcggctgatgaatcctctggtcgaccagtacctgtattatctgaacaagacacaaacaaatagtggaactcttcagcagtctcggctactgtttagccaagctggacccaccaacatgtctcttcaagctaaaaactggctgcctggaccttgctacagacagcagcgtctgtcaaagcaggcaaacgacaacaacaacagcaactttccctggactgcagctacaaagtatcatctaaatggccgggactcgttggttaatccaggaccagctatggccagtcacaaggatgacgaagaaaagtttttccccatgcatggaacccttatatttggtaaacaaggaacaaatgccaacgacgcggatttggaaaatgtcatgattacagatgaagaagaaatcaggaccaccaatcccgtggctacggagcagtacggaactgtatcaaataatttgcaaaactcaaacactggtccaactactggaactgtcaatcaccaaggagcgttacctggtatggtgtggcaggatcgagacgtgtacctgcagggacccatttgggccaagattcctcacaccgatggacactttcatccttctccactgatgggaggttttggactcaaacacccacctcctcaaatcatgatcaaaaacactcccgttccagccaatcctcccacaaacttcagttctgccaagtttgcttctttcatcacacagtattccacggggcaggtcagcgtggagatcgagtgggagctgcagaaggagaacagcaaacgctggaatcccgaaattcagtacacttccaactacaacaaatctgttaatgtggactttactgtggacactaatggtgtgtattcagagcctcgccccattggcaccagatacctgactcgtaatctgtaattgcttgttaatcaataaaccgtttaattcgtttcagttgaactttggtctctgcgaagggcgaattcgtttaaacctgcaggactagtccctttagtga

SEQ ID NO: 332 - protein, 735 aa, Adeno-associated virus
MAADGYLPDWLEDTLSEGIRQWWKLKPGPPPPKPAERHKDDSRGLVLPGYKYLGPFNGLDKGEPVNEADAAALEHDKAYDRQLDSGDNPYLKYNHADAEFQERLKEDTSFGGNLGRAVFQAKKRVLEPLGLVEEPVKTAPGKKRPVEHPPVEPDSSSGTGKAGQQPARKRLNFGQTGDADSVPDPQPLGQPPAAPSGLGSTTMATGSGAPMADNNEGADGVGNSSGNWHCDSQWLGDRVITTSTRTWALPTYNNHLYKQISSQSGASNDNHYFGYSTPWGYFDFNRFHCHFSPRDWQRLINNNWGFRPKRLNFKLFNIQVKEVTQNDGTTTIANNLTSTVQVFTDSEYQLPYVLGSAHQGCLPPFPADVFMVPQYGYLTLNNGSQAVGRSSFYCLEYFPSQMLRTGNNFQFSYTFEDVPFHSSYAHSQSLDRLMNPLIDQYLYYLNKTQTNSGTLQQSRLLFSQAGPTNMSLQAKNRLPGPCYRQQRLSKQANDNNNSNFPWTAATKYHLNGRDSLVNPGPAMASHKDDEEKFFPMHGTLIFGKQGTNANDADLENVMITDEEEIRTTNPVATEQYGTVSNNLQNSNTGPTTGTVNHQGALPGMVWQDRDVYLQGPIWAKIPHTDGHFHPSPLVGGFGLKHPPPQIMIKNTPVPANPPTNFSSAKFASFITQYSTGQVSVEIEWELQKENSKRWNPEIQYTSNYNKSVNVDFTVDTNGVYSEPRPIGTRYLTRNL

SEQ ID NO: 333 - DNA, 3159 bp, Adeno-associated virus
gattgaatttagcggccgcgaattcgcccttgctgcgtcaactggaccaatgagaactttcctttcaatgattgcgtcgacaagatggtgatctggtgggaggagggaaagatgaccgccaaggtcgtggagtcggccaaagccattctcggaggaagcaaggtgcgcgtggaccagaaatgcaagtcctcggcccagatagacccgactcccgtgattgtcacctccaacaccgacatgtgcgccgtgattgacgggaactcaacgaccttcgaacaccagcagccgttgcaagaccggatgttcaaatttgaactcacccgccgtctggatcatgactttgggaaggtcaccaagcaggaagtcaaagactttttccggtgggcaaaggatcacgtggttgaggtggagcatgaattctacgtcaaaaagggtggagctaagaaaagacccgcccccagtgacgcagatataagtgagcccaaacgggcgcgcgagtcagttgcgcagccatcgacgtcagacgcggaagcttcgatcaactacgcggacaggtaccaaaacaaatgttctcgtcacgtgggcatgaatctgatgctgtttccctgcagacaatgcgagagaatgaatcagaattcaaatatctgcttcactcacggacagaaagactgtttagagtgctttcccgtgtcagaatctcaacccgtttctgtcgtcaaaaaggcgtatcagaaactttgctacattcatcatatcatgggaaaggtgccagacgcttgcactgcctgcgatctggtcaatgtggatttggatgactgcatctctgaacaataaatgatttaaatcaggtatggctgccgatggttatcttccagattggctcgaggacactctctctgaaggaataagacagtggtggaagctcaaacctggcccaccaccaccaaagcccgcagagcggcataaggacgacagcaggggtcttgtgcttcctgggtacaagtacctcggacccttcaacggactcgacaagggggagccggtcaacgaggcagacgccgcggccctcgagcacgacaaggcctacgaccggcagctcgacagcggagacaacccgtacctcaagtacaaccacgccgacgcggagtttcaggagcgccttaaagaagatacgtcttttgggggcaacctcggacgagcagtcttccaggcaaaaaagagggttcttgaacctctgggcctggttgaggaacctgttaaaacggctccgggaaaaaagaggccggtagagcaccctcctgtggagccagactcctcctcgggaaccggaaaagcgggccagcagcctgcaagaaaaagattgaatttcggtcagactggagacgcagactccgtacctgacccccagcctctcggacagccaccagcagccccctctggtctgggatctactacaatggctacaggcagtggcgcaccaatggcagacaataacgagggtgccgatggagtgggtaattcctcgggaaattggcattgcgattcccaatggctgggcgacagagtcatcaccaccagcacccgcacctgggccctgcccacctacaacaaccacctctacaagcaaatctccagccaatcaggagcctcaaacgacaaccactactttggctacagcaccccctgggggtattttgacttcaacagattccactgccacttttcaccacgtgactggcaaagactcatcaacaacaactggggattccgacccaagagactcaacttcaagctctttaacattcaagtcaaagaggtcacgcagaatgacggtacgacgacgattgccaataaccttaccagcacggttcaggtgtttactgactcggagtaccagctcccgtacgtcctcggctcggcgcatcaaggatgcctcccgccgtttccagcggacgtcttcatggtcccacagtatggatacctcaccctgaacaacgggagtcaggcagtaggacgctcttcattttactgcctggagtactttccttctcagatgctgcgtaccggaaacaactttcagttcagctacacttttgaagacgtgcctttccacagcagctacgctcacagccagagtctggatcggctgatgaatcctctgatcgaccagtacctgtattatctgaacaagacacaaacaaatagtggaactcttcagcagtctcggctactgtttagccaagctggacccaccaacatgtctcttcaagctaaaaaccggctgcctggaccttgctacagacagcagcgtctgtcaaagcaggcaaacgacaacaacaacagcaactttccctggaccgcagctacaaagtatcatctaaatggccgggactcgttggttaatccaggaccagctatggccagtcacaaggatgacgaagaaaagtttttccccatgcatggaacccttatatttggtaaacaaggaacaaatgccaacgacgcggatttggaaaatgtcatgattacagatgaagaagaaatcaggaccaccaatcccgtggctacggagcagtacggaactgtatcaaataatttgcaaaactcaaacactggtccaactactggaactgtcaatcaccaaggagcgttacctggtatggtgtggcaggatcgagacgtgtacctgcagggacccatttgggccaagattcctcacaccgatggacactttcatccttctccactggtgggaggttttggactcaaacacccacctcctcaaatcatgatcaaaaacactcccgttccagccaatcctcccacaaacttcagttctgccaagtttgcttctttcatcacacagtattccacggggcaggtcagcgtggagatcgagtgggagctgcagaaggagaacagcaaacgctggaatcccgaaattcagtacacttccaactacaacaaatctgttaatgtggactttactgtggacactaatggtgtgtattcagagcctcgccccattggcaccagatacctgactcgtaatctgtaattgcttgttaatcaataaaccgtttaattcgtttcagttgaactttggtctctgcgaagggcgaattcgtttaaacctgcaggactagtccctttagtgag

SEQ ID NO: 334 - DNA, 2208 bp, Adeno-associated virus
atggctgccgatggttatcttccagattggctcgaggacactctctctgaaggaataagacagtggtggaagctcaaacctggcccaccaccaccaaagcccgcagagcggcataaggacgacagcaggggtcttgtgcttcctgggtacaagtaccttggacccttcaacggactcgacaagggagagccggtcaacgaggcagacgccgcggccctcgagcacgacaaggcctacgaccggcagctcgacagcggagacaacccgtaccccaagtacaaccacgccgacgcggagttccaggagcgtcttaaagaagatacgtcttttgggggcaacctcggacgagcagtcttccaggcgaaaaagagggttcttgaacctctgggcctggttgaggaacctgttaagacggctccgggaaaaaagaggccggtagagcactctcctgcggagccagactcctcctcgggaaccggaaaagcgggccagcagcctgcaagaaagagattgaatttcggtcagactggagacgcagactccgtacctgacccccagcctctcggacagccaccagcagccccctctggtctgggaactaatacgatggctacaggcagtggcgcaccaatggcagacaataacgagggcgccgacggagtgggtaattcctcgggaaattggcattgcgattccacatggatgggcgacagagtcatcaccaccagcacccgcacctgggctctgcccacctacaacaaccacctctacaagcagatttccagccaatcaggagcctcaaacgacaaccactactttggctacagcaccccttgggggtattttgacttcaacagattccactgccacttttcgccacgtgactggcaaagactcatcaacaacaattggggattccggcccaaaagactcaacttcaagctctttaacattcaagtcaaggaggtcacgcagaatgacggtacgacgacgattgccaataaccttaccagcacggttcaggtgtttactgactcggagtaccagctcccgtacgtcctcggctcggcgcatcaaggatgcctcccgccgttcccagcagacgtcttcatggtgccacagtatggatacctcaccctgaacaacgggagtcaggcagtaggacgctcttcattttactgcctggagtactttccttctcagatgctgcgtaccggaaacaactttaccttcagctacacctttgaggacgttcctttccacagcagctacgcccacagccagagtttggaccgtctcatgaatcctctcatcgaccagtacctgtattacttgagcagaacaaacactccaagcggaaccaccacgcagtcaaggcttcagttttctcaggccggagcaagtgacattcgggaccagtctaggaactggcttcctggaccctgttaccgccagcagcgagtatcaaagacatctgcggataacaacaacagtgaatactcgtggactggagctaccaagtaccaccttaatggaagagactctctggtgaatccgggcccggccatggccagccacaaggacgatgaagaaaagttttttcctcagagcggggttctcatctttggaaaacaagactcgggaaaaactaatgtggacattgaaaaggtcatgattacagacgaagaggaaatcaggaccaccaatcccgtggctacggagcagtatggttctgtatctaccaacctccagagcggcaacacacaagcagctacctcagatgtcaacacacaaggcgttcttccaggcatggtgtggcaggacagagacgtgtacctgcaggggcccatctgggcaaagattccacacacggacggacattttcacccctctcccctcatgggcggattcggacttaaacaccctcccccgcagattctcatcaagaacaccccggtacctgcgaatccttcgactaccttcagtgcggcaaagtttgcttccttcattacacagtactccacggggcaggtcagcgtggagatcgagtgggagctgcagaaggagaacagcaaacgctggaatcccgagattcagtacacttccaactacaacaaatctgttaatgtggactttactgtggacactaatggtgtgtattcagagcctcgccccattggcaccaggtacctgactcgtaatctgtaa

SEQ ID NO: 335 - protein, 735 aa, Adeno-associated virus
MAADGYLPDWLEDTLSEGIRQWWKLKPGPPPPKPAERHKDDSRGLVLPGYKYLGPFNGLDKGEPVNEADAAALEHDKAYDRQLDSGDNPYPKYNHADAEFQERLKEDTSFGGNLGRAVFQAKKRVLEPLGLVEEPVKTAPGKKRPVEHSPAEPDSSSGTGKAGQQPARKRLNFGQTGDADSVPDPQPLGQPPAAPSGLGTNTMATGSGAPMADNNEGADGVGNSSGNWHCDSTWMGDRVITTSTRTWALPTYNNHLYKQISSQSGASNDNHYFGYSTPWGYFDFNRFHCHFSPRDWQRLINNNWGFRPKRLNFKLFNIQVKEVTQNDGTTTIANNLTSTVQVFTDSEYQLPYVLGSAHQGCLPPFPADVFMVPQYGYLTLNNGSQAVGRSSFYCLEYFPSQMLRTGNNFTFSYTFEDVPFHSSYAHSQSLDRLMNPLIDQYLYYLSRTNTPSGTTTQSRLQFSQAGASDIRDQSRNWLPGPCYRQQRVSKTSADNNNSEYSWTGATKYHLNGRDSLVNPGPAMASHKDDEEKFFPQSGVLIFGKQDSGKTNVDIEKVMITDEEEIRTTNPVATEQYGSVSTNLQSGNTQAATSDVNTQGVLPGMVWQDRDVYLQGPIWAKIPHTDGHFHPSPLMGGFGLKHPPPQILIKNTPVPANPSTTFSAAKFASFITQYSTGQVSVEIEWELQKENSKRWNPEIQYTSNYNKSVNVDFTVDTNGVYSEPRPIGTRYLTRNL

SEQ ID NO: 336 - DNA, 2208 bp, Adeno-associated virus
atggctgccgatggttatcttccagattggctcgaggacactctctctgaaggaataagacagtggtggaagctcaaacctggcccaccaccaccaaagcccgcagagcggcataaggacgacagcaggggtcttgtgcttcctgggtacaagtaccttggacccttcaacggactcgacaagggagagccggtcaacgaggcagacgccgcggccctcgagcacgacaaggcctacgaccggcagctcgacggcggagacaacccgtacctcaagtacaaccacgccgacgcggagttccaggagcgtcttaaagaagatacgtcttttgggggcaacctcggacgagcagtcttccaggcgaaaaagagggttcttgaacctctgggcctggttgaggaacctgttaagacggctccgggaaaaaagaggccggtagagcactctcttgcggagccagactcctcctcgggaaccggaaaagcgggccagcagcctgcaagaaggagattgaatttcggtcagactggagacgcagactccgtacctgacccccagcctctcggacagccaccagcagccccctctggtctgggaactaatacgatggctacaggcagtggcgcaccaatggcagacaataacgagggcgccgacggagtgggtaattcctcgggaaattggcattgcgattccacatggatgggcgacagagtcatcaccaccagcacccgcacctgggctctgcccacctacaacaaccacctctacaggcagatttccagccaatcaggagcctcaaacgacaaccactactttggctacagcaccccttgggggtattttgacttcaacagattccactgccacttttcgccacgtgactggcaaagactcatcaacaacaattggggatcccggcccaaaagactcaacttcaagctctttaacattcaagtcaaggaggtcacgcagaatgacggtacgacgacgattgccaataaccttaccagcacggttcaggtgtttactgactcggagtaccagctcccgtacgtcctcggctcggcgcatcaaggatgcctcccgccgttcccagcagacgtcttcatggtgccacagtatggatacctcaccctgaacaacgggagtcaggcagtaggacgctcttcattttactgcctggagtactttccttctcagatgctgcgtaccggaaacaactttaccttcagctacacctttgaggacgttcctttccacagcagctacgcccacagccagagtttggaccgtctcatgaatcctctcgtcgaccagtacctgtattacttgagcagaacaaacactccaagcggaaccaccacgcagtcaaggcttcagttttctcaggccggagcaagtgacattcgggaccagtctaggaactggcttcctggaccctgttaccgccagcagcgagtatcaaagacatctgcggataacaacaacagtgaatactcgtggactggagctaccaagtaccaccttaatggaagagactctctggtgaatccgggcccggccatggccagccacaaggacgatgaagaaaagttttttcctcagagcggggttctcatctttggaaaacaagactcgggaaaaactaatgtggacattgaaaaggtcatgattacagacgaagaggaaatcaggaccaccaatcccgtggctacggagcagtatggttctgtatctaccaacctccagagcggcaacacacaagcagctacctcagatgtcaacacacaaggcgttcttccaggcatggtgtggcaggacagagacgtgtacctgcaggggcccatctgggcaaagattccacacacggacggacattttcacccctctcccctcatgggcggattcggacttaaacaccctcccccgcagattctcatcaagaacaccccggtacctgcgaatccttcgactaccttcagtgcggcaaagtttgcttccttcattacacagtactccacggggcaggtcagcgtggagatcgagtgggagctgcagaaggagaacagcaaacgctggaatcccgagattcagtacacttccaactacaacaaatctgttaatgtggactttactgtggacactaatggtgtgtattcagagcctcgccccattggcaccagatacctgactcgtaatctgtaa

SEQ ID NO: 337 - protein, 735 aa, Adeno-associated virus
MAADGYLPDWLEDTLSEGIRQWWKLKPGPPPPKPAERHKDDSRGLVLPGYKYLGPFNGLDKGEPVNEADAAALEHDKAYDRQLDGGDNPYLKYNHADAEFQERLKEDTSFGGNLGRAVFQAKKRVLEPLGLVEEPVKTAPGKKRPVEHSLAEPDSSSGTGKAGQQPARRRLNFGQTGDADSVPDPQPLGQPPAAPSGLGTNTMATGSGAPMADNNEGADGVGNSSGNWHCDSTWMGDRVITTSTRTWALPTYNNHLYRQISSQSGASNDNHYFGYSTPWGYFDFNRFHCHFSPRDWQRLINNNWGSRPKRLNFKLFNIQVKEVTQNDGTTTIANNLTSTVQVFTDSEYQLPYVLGSAHQGCLPPFPADVFMVPQYGYLTLNNGSQAVGRSSFYCLEYFPSQMLRTGNNFTFSYTFEDVPFHSSYAHSQSLDRLMNPLVDQYLYYLSRTNTPSGTTTQSRLQFSQAGASDIRDQSRNWLPGPCYRQQRVSKTSADNNNSEYSWTGATKYHLNGRDSLVNPGPAMASHKDDEEKFFPQSGVLIFGKQDSGKTNVDIEKVMITDEEEIRTTNPVATEQYGSVSTNLQSGNTQAATSDVNTQGVLPGMVWQDRDVYLQGPIWAKIPHTDGHFHPSPLMGGFGLKHPPPQILIKNTPVPANPSTTFSAAKFASFITQYSTGQVSVEIEWELQKENSKRWNPEIQYTSNYNKSVNVDFTVDTNGVYSEPRPIGTRYLTRNL

SEQ ID NO: 338 - protein, 738 aa, Adeno-associated virus
MAADGYLPDWLEDNLSEGIREWWDLKPGAPKPKANQQKQDDGRGLVLPGYKYLGPFNGLDKGEPVNAADAAALEHDKAYDQQLKAGDNPYLRYNHADAEFQERLQEDTSFGGNLGRAVFQAKKRVLEPLGLVEEAAKTAPGKKRPVEPSPQRSPDSSAGIGKKGQQPAKKRLNFGQTGDSESVPDPQPIGEPPAGPSGLGSGTMAAGGGAPMADNNEGADGVGSSSGNWHCDSTWLGDRVITTSTRTWALPTYNNHLYKQISNGTSGGSTNDNTYFGYSTPWGYFDFNRFHCHFSPRDWQRLINNNWGFRPKRLSFKLFNIQVKEVTQNEGTETIANNLTSTIQVFTDSEYQLPYVLGSAHQGCLPPFPADVFMIPQYGYLTLNNGSQAVGRSSFYCLEYFPSQMLRTGNNFEFSYTFEDVPFHSSCAHSQSSDRLMNPLIDQYLYYLSRTRSTGGTQGTQQLLFSQAGPANMSAQAKNWLPGPCYRQQRVSTTLSQNNNSNFAWTGATKYHLNGRDSLVNPGVAMATHKDDEERFFPSSGVLMFGKQGAGRDNVDYSSVMLTSEEEIKTTNPVATEQYGVVADNLQQTNTGPIVGNVNSQGALPGMVWQNRDVYLQGPIWAKIPHTDGNFHPSPLMGGFGLKHPPPQILIKNTPVPADPPTTFSQAKLASFITQYSTGQVSVEIEWELQKENSKRWNPEIQYTSNYYKSTNVDFAVNTEGTYSEPRPIGTRYLTRNL

SEQ ID NO: 339 - DNA, 2217 bp, Adeno-associated virus
atggctgctgacggttatcttccagattggctcgaggacaacctctctgagggcattcgcgagtggtgggacctgaaacctggagcccccaagcccaaggccaaccagcagaagcaggacgacggccggggtctggtgcttcttggctacaagtacctcggacccttcaacggactcgacaagggggagcccgtcaatgcggcggacgcagcggccctcgagcacgacaaggcctacgaccagcagctcaaagcgggtgacaatccgtacctgcggtataaccacgccgacgccgagtttcaggagcgtctgcaagaagatacgtcttttgggggcaacctcgggcgagcagtcttccaggccaagaagcgggttctcgaacctctcggtctggttgaggaagctgctaagacggctcctggaaagaagagaccggtagaaccgtcacctcagcgttcccccgactcctccacgggcatcggcaagaaaggccagcagcccgctaaaaagagactgaactttggtcagactggcgactcagagtcagtccccgaccctcaaccaatcggagaaccaccagcaggcccctctggtctgggatctggtacaatggctgcaggcggtggcgctccaatggcagacaataacgaaggcgccgacggagtgggtagttcctcaggaaattggcattgcgattccacatggctgggcgacagagtcatcaccaccagcacccgaacctgggccctgcccacctacaacaaccacctctacaagcaaatatccaatgggacatcgggaggaagcaccaacgacaacacctacttcggctacagcaccccctgggggtattttgacttcaacagattccactgccacttctcaccacgtgactggcagcgactcatcaacaacaactggggattccggccaaaaagactcagcttcaagctcttcaacatccaggtcaaggaggtcacgcagaatgaaggcaccaagaccatcgccaataaccttaccagcacgattcaggtatttacggactcggaataccagctgccgtacgtcctcggctccgcgcaccagggctgcctgcctccgttcccggcggacgtcttcatgattccccagtacggctaccttacactgaacaatggaagtcaagccgtaggccgttcctccttctactgcctggaatattttccatctcaaatgctgcgaactggaaacaattttgaattcagctacaccttcgaggacgtgcctttccacagcggctacgcacacagccagagcttggaccgactgatgaatcctctcatcgaccagtacctgtactacttatccagaactcagtccacaggaggaactcaaggtacccagcaattgttattttctcaagctgggcctgcaaacatgtcggctcaggctaagaactggctacctggaccttgctaccggcagcagcgagtctctacgacactgtcgcaaaacaacaacagcaactttgcttggactggtgccaccaaatatcacctgaacggaagagactctttggtaaatcccggtgtcgccatggcaacccacaaggacgacgaggaacgcttcttcccgtcgagtggagtcctgatgtttggaaaacagggtgctggaagagacaatgtggactacagcagcgttatgctaaccagcgaagaagaaattaaaaccactaaccctgtagccacagaacaatacggtgtggtggctgacaacttgcagcaaaccaatacagggcctattgtgggaaatgtcaacagccaaggagccttacctggcatggtctggcagaaccgagacgtgtacctgcagggtcccatctgggccaagattcctcacacggacggcaacttccacccttcaccgctaatgggaggatttggactgaagcacccacctcctcagatcctgatcaagaacacgccggtacctgcggatcctccaacgacgttcagccaggcgaaattggcttccttcattacgcagtacagcaccggacaggtcagcgtggaaatcgagtgggagctgcagaaggagaacagcaaacgctggaacccagagattcagtacacttcaaactactacaaatctacaaatgtggactttgctgtcaatacagagggaacttattctgagcctcgccccattggtactcgttacctcacccgtaatctgtaa

SEQ ID NO: 340 - protein, 738 aa, Adeno-associated virus
MAADGYLPDWLEDNLSEGIREWWDLKPGAPKPKANQQKQDDGRGLVLLGYKYLGPFNGLDKGEPVNAADAAALEHDKAYDQQLKAGDNPYLRYNHADAEFQERLQEDTSFGGNLGRAVFQAKKRVLEPLGLVEEAAKTAPGKKRPVEPSPQRSPDSSTGIGKKGQQPAKKRLNFGQTGDSESVPDPQPIGEPPAGPSGLGSGTMAAGGGAPMADNNEGADGVGSSSGNWHCDSTWLGDRVITTSTRTWALPTYNNHLYKQISNGTSGGSTNDNTYFGYSTPWGYFDFNRFHCHFSPRDWQRLINNNWGFRPKRLSFKLFNIQVKEVTQNEGTKTIANNLTSTIQVFTDSEYQLPYVLGSAHQGCLPPFPADVFMIPQYGYLTLNNGSQAVGRSSFYCLEYFPSQMLRTGNNFEFSYTFEDVPFHSGYAHSQSLDRLMNPLIDQYLYYLSRTQSTGGTQGTQQLLFSQAGPANMSAQAKNWLPGPCYRQQRVSTTLSQNNNSNFAWTGATKYHLNGRDSLVNPGVAMATHKDDEERFFPSSGVLMFGKQGAGRDNVDYSSVMLTSEEEIKTTNPVATEQYGVVADNLQQTNTGPIVGNVNSQGALPGMVWQNRDVYLQGPIWAKIPHTDGNFHPSPLMGGFGLKHPPPQILIKNTPVPADPPTTFSQAKLASFITQYSTGQVSVEIEWELQKENSKRWNPEIQYTSNYYKSTNVDFAVNTEGTYSEPRPIGTRYLTRNL

SEQ ID NO: 341 - protein, 735 aa, Adeno-associated virus
MAADGYLPDWLEDTLSEGIRQWWKLKPGPPPPKPAERHKDDSRGLVLPGYKYLGPFNGLDKGEPVNEADAAALEHDKAYDRQLDSGDNPYLKYNHADAEFQERLKEDTSFGGNLGRAVFQAKKRVLEPLGLVEPPVKTAPGKKRPVEHSPAEPDSSSGTGKAGQQPARKRLNFGQTGDADSVPDPQPLGQPPAAPSGLGSTTMATGSGAPMADNNEGADGVGNSSGNWHCDSQWLGDRVITTSTRTWALPTYNNHLYKQISSQSGASNDNHYFGYSTPWGYFDFNRFHCHFSPRDWQRLINNNWGFRPKRLNFKLFNIQVKEVTQNDGTTTIANNLTSTVQVFTDSEYQLPYVLGSAHQGCLPPFPADVFMVPQYGYLTLNNGSQAVGRSSFYCLEYFPSQMLRTGNNFQFSYTFEDVPFHSSYAHSQSLDRLMNPLIDQYLYYLNKTQSNSGTLQQSRLLFSQAGPTSMSLQAKNWLPGPCYRQQRLSKQANDNNNSNFPWTAATKYHLNGRDSLVNPGPAMASHKDDEEKFFPMHGTLIFGKQGTNANDADLDNVMITDEEEIRTTNPVATEQYGYVSNNLQNSNTGPTTGTVNHQGALPGMVWQDRDVYLQGPIWAKIPHTDGHFHPSPLMGGFGLKHPPPQIMIKNTPVPANPPTNFSSAKFASFITQYSTGQVSVEIEWELQKENSKRWNPEIQYTSNYNKSVNVDFTVDTNGVYSEPRPIGTRYLTRNL

SEQ ID NO: 342 - protein, 735 aa, Adeno-associated virus
MAADGYLPDWLEDTLSEGIRQWWKLKPGPPPPKPAERHKDDSRGLVLPGYKYLGPFNGLDKGEPVNEADAAALEHDKAYDRQLDSGDNPYLKYNHADAEFQERLKEDTSFGGNLGRAVFQAKKRVLEPLGLVEGPVKTAPGKKRPVEHSPAEPDSSSGTGKAGQQPARKRLNFGQTGDADSVPDPQPLGQPPAAPSGLGSTTMATGSGAPMADNNEGADGVGNSSGNWHCDSQWLGDRVITTSTRTWALPTYNNHLYKQISSQSGASNDNHYFGYSTPWGYFDFNRFHCHFSPRDWQRLINNNWGFRPKRLNFKLFNIQVKEVTQNDGTTTIANNLTSTVQVFTDSEYQLPYVLGSAHQGCLPPFPADVFMVPQYGYLTLNNGSQAVGRSSFYCLEYFPSQMLRTGNNFQFSYTFEDVPFHSSYAHSQSLDRLMNPLIDQYLYYLNKTQSNSGTLQQSRLLFSQAGPTSMSLQAKNWLPGPCYRQQRLSKQANDNNNSNFPWTAATKYHLNGRDSLVNPGPAMASHKDDEEKFFPMHGTLIFGKQGTNANDADLDNVMITDEEEIRTTNPVATEQYGYVSNNLQNSNTGPTTGTVNHQGALPGMVWQDRDVYLQGPIWAKIPHTDGHFHPSPLMGGFGLKHPPPQIMIKNTPVPANPPTNFSSAKFASFITQYSTGQVSVEIEWELQKENSKRWNPEIQYTSNYNKSVNVDFTVDTNGVYSEPRPIGTRYLTRNL

SEQ ID NO: 343 - DNA, 2208 bp, Adeno-associated virus
atggctgccgatggttatcttccagattggctcgaggacactctctctgaaggaataagacagtggtggaagctcaaacctggcccaccaccaccaaagcccgcagagcggcataaggacgacagcaggggtcttgtgcttcctgggtacaagtacctcggacccttcaacggactcgacaagggggagccggtcaacgaggcagacgccgcggccctcgagcacgacaaggcctacgaccggcagctcgacagcggagacaacccgtacctcaagtacaaccacgccgacgcggagtttcaggagcgtcttaaagaagatacgtcttttgggggcaacctcggacgagcagtcttccaggcgaaaaagagggttcttgaacctctgggcctggttgagggacctgttaagacggctccgggaaaaaagaggccggtagagcactctcctgcggagccagactcctcctcgggaaccggaaaagcgggccagcagcctgcaagaaaaagattgaattttggtcagactggagacgcagactccgtacctgacccccagcctctcggacagccaccagcagccccctctggtttgggatctactacaatggctacaggcagtggcgcaccaatggcagacaataacgagggtgccgatggagtgggtaattcctcaggaaattggcattgcgattcccaatggctgggcgacagagtcatcaccaccagcacccgaacctgggccctgcccacctacaacaaccacctctacaagcaaatctcaagccaatcaggagcctcaaacgacaaccactactttggctacagcaccccttgggggtattttgacttcaacagattccactgccacttttcaccacgtgactggcaaagactcatcaacaacaactggggattccgacccaagagactcaacttcaagctctttaacattcaagtcaaagaggtcacgcagaatgacggtacgacgacgattgccaataaccttaccagcacggttcaggtgtttactgactcggagtaccagctcccgtacgtcctcgggtcggcgcatcaaggatgcctcccgccgtttccagcggacgtcttcatggtcccacagtatggatacctcaccctgaacaacgggagtcaggcggtaggacgctcttccttttactgcctggagtactttccttctcagatgcttcgtactggaaacaactttcagttcagctacacctttgaagacgttcctttccacagcagctacgctcacagccagagtctggatcggctgatgaatcctctgatcgaccagtacctgtattatctgaacaaaacacaatcaaatagtggaactcttcagcagtctcggctactgtttagtcaagctggacccaccagcatgtctcttcaagctaaaaactggctacctggaccttgctacagacagcagcgtctgtcaaagcaggcaaacgacaacaacaacagcaactttccctggactgcggctacaaagtatcacctaaatggccgggactcgttggttaatccaggaccagctatggccagtcacaaagacgatgaagaaaagtttttccccatgcatggaaccctgatatttggtaaacaaggaacaaatgctaacgacgcggatttggacaatgtcatgattacagatgaagaagaaatccgcaccaccaatcccgtggctacggagcagtacggatatgtgtcaaataatttgcaaaactcaaatactggtccaactactggaactgtcaatcaccaaggagcgttacctggcatggtgtggcaggatcgagacgtgtacctgcagggacccatttgggccaagattcctcacaccgatggacactttcatccttctccactgatgggaggttttgggctcaaacacccgcctcctcagatcatgatcaaaaacactcccgttccagccaatcctcccacaaacttcagttctgccaagtttgcttctttcatcacacagtattccacggggcaggtcagcgtggagatcgagtgggagctgcagaaagagaacagcaaacgctggaatcccgaaattcagtacacttccaactacaacaaatctgttaatgtggactttactgtggacactaatggcgtgtattcagagcctcgccccattggcaccagatacctgactcgtaatctgtaa

SEQ ID NO: 344 - DNA, 2211 bp, Adeno-associated virus; identical to SEQ ID NO: 25

SEQ ID NO: 345 - DNA, 2208 bp, Adeno-associated virus
atggctgccgatggttatcttccagattggctcgaggacactctctctgaaggaacaagacagtggtggaagctcaaacctggcccaccaccaccaaagcccgcagagcggcataaggacgacagcaggggtcttgtgcttcctgggtacaagtacctcggacccttcaacggactcgacaagggggagccggtcaacgaggcagacgccgcggccctcgagcacgacaaggcctacgaccggcagctcgacagcggagacaacccgtacctcaagtacaaccacgccgacgcggagtttcaggagcgtcttaaagaagatacgtcttttgggggcaacctcggacgagcagtcttccaggcgaaaaagagggttcttgaacctctgggcctggttgaggaacctgttaagacggctccgggaaaaaagaggccggtagagcactctcctgcggagccagactcctcctcgggaaccggaaaagcgggccagcagcctgcaagaaaaagattgaattttggtcagactggagacgcagactccgtacctgacccccagcctctcggacagccaccagcagccccctctggtttgggatctactacaatggctacaggcagtggcgcaccaatggcagacaataacgagggtgccgatggagtgggtaattcctcaggaaattggcattgcgattcccaatggctgggcgacagagtcatcaccaccagcacccgaacctgggccctgcccacctacaacaaccacctctacaagcaaatctcaagccaatcaggagcctcaaacgacaaccactactttggctacagcaccccttgggggtattttgacttcaacagattccactgccacttttcaccacgtgactggcaaagactcatcaacaacaactggggattccgacccaagagactcaacttcaagctctttaacattcaagtcaaagaggtcacgcagaatgacggtacgacgacgattgccaataaccttaccagcacggttcaggtgtttactgactcggagtaccagctcccgtacgtcctcgggtcggcgcatcaaggatgcctcccgccgtttccagcggacgtcttcatggtcccacagtatggatacctcaccctgaacaacgggagtcaggcggtaggacgctcttccttttactgcctggagtactttccttctcagatgcttcgtactggaaacaactttcagttcagctacacctttgaagacgttcctttccacagcagctacgctcacagccagagtctggatcggctgatgaatcctctgatcgaccagtacctgtattatctgaacaaaacacaatcaaatagtggaactcttcagcagtctcggctactgtttagtcaagctggacccaccagcatgtctcttcaagctaaaaactggctacctggaccttgctacagacagcagcgtctgtcaaagcaggcaaacgacaacaacaacagcaactttccctggactgcggctacaaagtaccacctaaatggccgggactcgttggttaatccaggaccagctatggccagtcacaaagacgatgaagaaaagtttttccccatgcatggaaccctgatatttggtaaacaaggaacaaatgctaacgacgcggatttggacaatgtcatgattacagatgaagaagaaatccgcaccaccaatcccgtggctacggagcagtacggatatgtgtcaaataatttgcaaaactcaaatactggtccaactactggaactgtcaatcaccaaggagcgttacctggcatggtgtggcaggatcgagacgtgtacctgcagggacccatttgggccaagattcctcacaccgatggacactttcatccttctccactgatgggaggttttgggctcaaacacccgcctcctcagatcatgatcaaaaacactcccgttccagccaatcctcccacaaacttcagttctgccaagtttgcttctttcatcacacagtattccacggggcaggtcagcgtggagatcgagtgggagctgcagaaagagaacagcaaacgctggaatcccgaaattcagtacacttccaactacaacaaatctgttaatgtggactttactgtggacactaatggcgtgtattcagagcctcgccccattggcaccagatacctgactcgtaatctgtaa

SEQ ID NO: 346 - DNA, 2217 bp, Adeno-associated virus
atggctgctgacggttatcttccagattggctcgaggacaacctctctgagggcattcgcgagtggtgggacctgaaacctggagcccccaagcccaaggccaaccagcagaagcaggacgacggccggggtctggtgcttcctggctacaagtacctcggacccttcaacggactcgacaagggggagcccgtcaacgcggcggacgcagcggccctcgagcacgacaaggcctacgaccagcagctcaaagcgggtgacaatccgtacctgcggtataaccacgccgacgccgagtttcaggagcgtctgcaagaagatacgtcttttgggggcaacctcgggcgagcagtcttccaggccaagaagcgggttctcgaacctctcggtctggttgaggaagctgctaagacggctcctggaaagaagagaccggtagaaccgtcacctcagcgttcccccgactcctccacgggcatcggcaagaaaggccagcagcccgctaaaaagagactgaactttggtcagactggcgactcagagtcagtccccgaccctcaaccaatcggagaaccacctgcaggcccctctggtctgggatctggtacaatggctgcaggcggtggcgctccaatggcagacaataacgaaggcgccgacggagtgggtagttcctcaggaaattggcattgcgattccacatggctgggcgacagagtcatcaccaccagcacccgaacctgggccctgcccacctacaacaaccacctctacaagcaaatatccaatgggacatcgggagggagcaccaacgacaacacctacttcggctacagcaccccctgggggtattttgacttcaacagattccactgccacttctcaccacgtgactggcagcgactcatcaacaacaactggggattccggccaaaaagactcagcttcaagctcttcaacatccaggtcaaggaggtcacgcagaatgaaggcaccaagaccatcgccaataaccttaccagcacgattcaggtatttacggactcggaataccagctgccgtacgtcctcggctccgcgcaccagggctgcctgcctccgttcccggcggacgtcttcatgattccccagtacggctaccttacactgaacaatggaagtcaagccgtaggccgttcctccttctactgcctggaatattttccatctcaaatgctgcgaactggaaacaattttgaattcagctacaccttcgaggacgtgcctttccacagcagctacgcacacagccagagcttggaccgactgatgaatcctctcatcgaccagtacctgtactacttatccagaactcagtccacaggaggaactcaaggtacccagcaattgttattttctcaagctgggcctgcaaacatgtcggctcaggctaagaactggctacctggaccttgctaccggcagcagcgagtctctacgacactgtcgcaaaacaacaacagcaactttgcttggactggtgccaccaaatatcacctgaacggaagagactctttggtaaatcccggtgtcgccatggcaacccacaaggacgacgaggaacgcttcttcccgtcgagtggagtcctgatgtttggaaaacagggtgctggaagagacaatgtggactacagcagcgttatgctaaccagcgaagaagaaattaaaaccactaaccctgtagccacagaacaatacggtgtggtggctgacaacttgcagcaaaccaatacagggcctattgtgggaaatgtcaacagccaaggagccttacctggcatggtctggcagaaccgagacgtgtacctgcagggtcccatctgggccaagattcctcacacggacggcaactgccacccttcaccgctaatgggaggatttggactgaagcacccacctcctcagatcctgatcaagaacacgccggtacctgcggatcctccaacaacgttcagccaggcgaaattggcttccttcattacgcagtacagcaccggacaggtcagcgtggaaatcgagtgggagctgcagaaggagaacagcaaacgctggaacccagagattcagtacacttcaaactactacaaatctacaaatgtggactttgctgtcaatacagagggaacttattctgagcctcgccccattggtactcgttacctcacccgtaatctgtaa

SEQ ID NO: 347 - protein, 735 aa, Adeno-associated virus
MAADGYLPDWLEDTLSEGTRQWWKLKPGPPPPKPAERHKDDSRGLVLPGYKYLGPFNGLDKGEPVNEADAAALEHDKAYDRQLDSGDNPYLKYNHADAEFQERLKEDTSFGGNLGRAVFQAKKRVLEPLGLVEEPVKTAPGKKRPVEHSPAEPDSSSGTGKAGQQPARKRLNFGQTGDADSVPDPQPLGQPPAAPSGLGSTTMATGSGAPMADNNEGADGVGNSSGNWHCDSQWLGDRVITTSTRTWALPTYNNHLYKQISSQSGASNDNHYFGYSTPWGYFDFNRFHCHFSPRDWQRLINNNWGFRPKRLNFKLFNIQVKEVTQNDGTTTIANNLTSTVQVFTDSEYQLPYVLGSAHQGCLPPFPADVFMVPQYGYLTLNNGSQAVGRSSFYCLEYFPSQMLRTGNNFQFSYTFEDVPFHSSYAHSQSLDRLMNPLIDQYLYYLNKTQSNSGTLQQSRLLFSQAGPTSMSLQAKNWLPGPCYRQQRLSKQANDNNNSNFPWTAATKYHLNGRDSLVNPGPAMASHKDDEEKFFPMHGTLIFGKQGTNANDADLDNVMITDEEEIRTTNPVATEQYGYVSNNLQNSNTGPTTGTVNHQGALPGMVWQDRDVYLQGPIWAKIPHTDGHFHPSPLMGGFGLKHPPPQIMIKNTPVPANPPTNFSSAKFASFITQYSTGQVSVEIEWELQKENSKRWNPEIQYTSNYNKSVNVDFTVDTNGVYSEPRPIGTRYLTRNL

SEQ ID NO: 348 - DNA, 2208 bp, Adeno-associated virus
atggctgccgatggttatcttccagattggctcgaggacactctctctgaaggaataagacagtggtggaagctcaaacctggcccaccaccaccaaagcccgcagagcggcatcaggacaacagcaggggtcttgtgcttcctgggtacaagtacctcggaccctccaacggactcgacaaaggagagccggtcaacgaggcagacgccgcggccctcgagcacgacaaggcctacgaccggcagctcgacagcggagacaacccgtacctcaagtacaaccacgccgacgcggagtttcaggagcgtcttaaagaagatacgtcttttgggggcaacctcggacgagcagtcttccaggcgaaaaagagggttcttgaacctctgggcctggttgaggaacctgttaagacggctccgggaaaaaagaggccggtagagcactctcctgtggagccagactcctcctcgggaaccggaaaagcgggccatcagcctgcgagaaagagattgaattttggtcagactggagacgcagactccgtacctgacccccagcctctcggacagccaccagcagcccccacaagtttgggatctactacaatggctacaggcagtggcgcaccaatggcagacaataacgagggtgccgatggagtgggtaattcctcaggaaattggcattgcgattcccaatggctgggcgacagagtcatcaccaccagcacccgaacctgggccctgcccacctacaacaaccacctctacaagcaaatctccagccaatcaggagcctcgaacgacaaccactactttggctgcagcaccccctgggggtattttgacttcaacagattccactgtcacttctccccacgtgattggcaaagactcatcaacaacaactggggattccgacccaagagactcaacttcaagctctttaacattcaagtcaaagaggtcacgcagaatgacggtacgacgacgattgccaataaccttaccagcacggttcaggtgtttactgactcggagtacccgctcccgtacgtcctcggctcggcgcatcaaggatgcctcccgccgtttccagcggacgtcttcatggtcccacagtatggatacctcaccctgaacaacgggagtcaggcggtaggacgctcttccttttactgcctggagtactttccttctcagatgctgcgtaccggaaacaactttaccttcagctacacctttgaggacgttcctttccacagcagctacgctcacagccagagtttggaccggctgatgaatcctctgatcgaccagtatctatattatctgaacaggacacaatcaaatagtggaactcttcagcagtctaggctactgtttagccaagctggacccaccagcatgtctcttcaagctaaaaactggctgcctggaccttgctacagacagcagcgtctttcaaagcaggcaaacgacaacaacaacagcaactttccctggactgcggctacaaagtatcatctaaatggccgggactcgttggttaatccaggaccagctatggccagccacaaagacgatgaagaaaagtttttccccatgcatggaaccctgatatttggtaaacaaggaacaaatgctaacgacgcggatttggagcatgttatgattacagatgaagaagaaatcaggaccaccaatcctgtggctacagagcagtacggaaacgtgtcaaataatttgcaaaactcaaatactggtccaactacagaaaatgtcaatcaccagggagcgttacctggtatggtgtggcaggatcgagacgtgtacctgcagggacccatttgggccaagattcctcacaccgacggacactttcacccttctccactgatgggaggttttggactcaaacacccgcctcctcaaatcatgatcaaaaacactcccgttccagccaatcctcccacaaacttcagttctgccaagtttgcttctttcatcacacagtattccacgggccaggtcagcgtggagattgagtgggagctgcagaaggagaacagcaaacgctggaaccccgagatccagtatacttccaactacaacaaatctgttaatgtggactttactgtggacactaatggtgtgtattcagagccttgccccattggcaccagatacctgactcgtaatctgtaa

SEQ ID NO: 349 - protein, 735 aa, Adeno-associated virus
MAADGYLPDWLEDTLSEGIRQWWKLKPGPPPPKPAERHQDNSRGLVLPGYKYLGPSNGLDKGEPVNEADAAALEHDKAYDRQLDSGDNPYLKYNHADAEFQERLKEDTSFGGNLGRAVFQAKKRVLEPLGLVEEPVKTAPGKKRPVEHSPVEPDSSSGTGKAGHQPARKRLNFGQTGDADSVPDPQPLGQPPAAPTSLGSTTMATGSGAPMADNNEGADGVGNSSGNWHCDSQWLGDRVITTSTRTWALPTYNNHLYKQISSQSGASNDNHYFGCSTPWGYFDFNRFHCHFSPRDWQRLINNNWGFRPKRLNFKLFNIQVKEVTQNDGTTTIANNLTSTVQVFTDSEYPLPYVLGSAHQGCLPPFPADVFMVPQYGYLTLNNGSQAVGRSSFYCLEYFPSQMLRTGNNFTFSYTFEDVPFHSSYAHSQSLDRLMNPLIDQYLYYLNRTQSNSGTLQQSRLLFSQAGPTSMSLQAKNWLPGPCYRQQRLSKQANDNNNSNFPWTAATKYHLNGRDSLVNPGPAMASHKDDEEKFFPMHGTLIFGKQGTNANDADLEHVMITDEEEIRTTNPVATEQYGNVSNNLQNSNTGPTTENVNHQGALPGMVWQDRDVYLQGPIWAKIPHTDGHFHPSPLMGGFGLKHPPPQIMIKNTPVPANPPTNFSSAKFASFITQYSTGQVSVEIEWELQKENSKRWNPEIQYTSNYNKSVNVDFTVDTNGVYSEPCPIGTRYLTRNL

SEQ ID NO: 350 - DNA, 2214 bp, Artificial Sequence
  Description of Artificial Sequence: Synthetic polynucleotide
atggctgccgatggttatcttccagattggctcgaggacaaccttagtgaaggaattcgcgagtggtgggctttgaaacctggagcccctcaacccaaggcaaatcaacaacatcaagacaacgctcgaggtcttgtgcttccgggttacaaataccttggacccggcaacggactcgacaagggggagccggtcaacgcagcagacgcggcggccctcgagcacgacaaggcctacgaccagcagctgcaggcgggtgacaatccgtacctgcggtataaccacgccgacgccgagtttcaggagcgtctgcaagaagatacgtcttttgggggcaaccttggcagagcagtcttccaggccaaaaagaggatccttgagcctcttggtctggttgaggaagcagctaaaacggctcctggaaagaagaggcctgtagatcagtctcctcaggaaccggactcatcatctggtgttggcaaatcgggcaaacagcctgccagaaaaagactaaatttcggtcagactggcgactcagagtcagtcccagaccctcaacctctcggagaaccaccagcagcccccacaagtttgggatctaatacaatggcttcaggcggtggcgcaccaatggcagacaataacgagggtgccgatggggtgggtagttcctcgggaaattggcattgcgattcccaatggctgggggacagagtcatcaccaccagcacccgaacctgggccctgcccacctacaacaatcacctctacaagcaaatctccaacgggacatcgggaggagccaccaacgacaacacctacttcggctacagcaccccctgggggtattttgactttaacagattccactgccacttttcaccacgtgactggcagcgactcatcaacaacaactggggattccggcccaagagactcagcttcaagctcttcaacatccaggtcaaggaggtcacgcagaatgaaggcaccaagaccatcgccaataacctcaccagcaccatccaggtgtttacggactcggagtaccagctgccgtacgttctcggctctgcgcaccagggctgcctccctccgttcccggcggacgtgttcatgattccgcaatacggctacctgacgctcaacaatggcagccaagccgtgggacgttcatccttttactgcctggaatatttcccttctcagatgctgagaacgggcaacaactttaccttcagctacacctttgaggaagtgcctttccacagcagctacgcgcacagccagagcttggaccggctgatgaatcctctgattgaccagtacctgtactacttgtctcggactcaaacaacaggaggcacggcaaatacgcagactctgggcttcagccaaggtgggcctaatacaatggccaatcaggcaaagaactggctgccaggaccctgttaccgccaacaacgcgtctcaacgacaaccgggcaaaacaacaatagcaactttgcctggactgctgggaccaaataccatctgaatggaagaaattcattggctaatcctggcatcgctatggcaacacacaaagacgacgaggagcgtttttttcccagtaacgggatcctgatttttggcaaacaaaatgctgccagagacaatgcggattacagcgatgtcatgctcaccagcgaggaagaaatcaaaaccactaaccctgtggctacagaggaatacggtatcgtggcagataacttgcagcagcaaaacacggctcctcaaattggaactgtcaacagccagggggccttacccggtatggtctggcagaaccgggacgtgtacctgcagggtcccatctgggccaagattcctcacacggacggcaacttccacccgtctccgctgatgggcggctttggcctgaaacatcctccgcctcagatcctgatcaagaacacgcctgtacctgcggatcctccgaccaccttcaaccagtcaaagctgaactctttcatcacgcaatacagcaccggacaggtcagcgtggagatcgagtgggagctgcagaaggaaaacagcaagcgctggaacccggagatccagtacacttccaactattacaagtctaataatgttgaatttgctgttaatactgaaggtgtatatagtgaaccccgccccattggcaccagatacctgactcgtaatctgtaa

SEQ ID NO: 351 - protein, 737 aa, Artificial Sequence
  Description of Artificial Sequence: Synthetic polypeptide
MAADGYLPDWLEDNLSEGIREWWALKPGAPQPKANQQHQDNARGLVLPGYKYLGPGNGLDKGEPVNAADAAALEHDKAYDQQLQAGDNPYLRYNHADAEFQERLQEDTSFGGNLGRAVFQAKKRILEPLGLVEEAAKTAPGKKRPVDQSPQEPDSSSGVGKSGKQPARKRLNFGQTGDSESVPDPQPLGEPPAAPTSLGSNTMASGGGAPMADNNEGADGVGSSSGNWHCDSQWLGDRVITTSTRTWALPTYNNHLYKQISNGTSGGATNDNTYFGYSTPWGYFDFNRFHCHFSPRDWQRLINNNWGFRPKRLSFKLFNIQVKEVTQNEGTKTIANNLTSTIQVFTDSEYQLPYVLGSAHQGCLPPFPADVFMIPQYGYLTLNNGSQAVGRSSFYCLEYFPSQMLRTGNNFTFSYTFEEVPFHSSYAHSQSLDRLMNPLIDQYLYYLSRTQTTGGTANTQTLGFSQGGPNTMANQAKNWLPGPCYRQQRVSTTTGQNNNSNFAWTAGTKYHLNGRNSLANPGIAMATHKDDEERFFPSNGILIFGKQNAARDNADYSDVMLTSEEEIKTTNPVATEEYGIVADNLQQQNTAPQIGTVNSQGALPGMVWQNRDVYLQGPIWAKIPHTDGNFHPSPLMGGFGLKHPPPQILIKNTPVPADPPTTFNQSKLNSFITQYSTGQVSVEIEWELQKENSKRWNPEIQYTSNYYKSNNVEFAVNTEGVYSEPRPIGTRYLTRNL

SEQ ID NO: 352 - DNA, 2211 bp, Artificial Sequence
  Description of Artificial Sequence: Synthetic polynucleotide
atggctgccgatggttatcttccagattggctcgaggacaacctctctgagggcattcgcgagtggtgggacttgaaacctggagccccgaagcccaaagccaaccagcaaaagcaggacgacggccggggtctggtgcttcctggctacaagtacctcggacccttcaacggactcgacaagggggagcccgtcaacgcggcggacgcagcggccctcgagcacgacaaggcctacgaccagcagctcaaagcgggtgacaatccgtacctgcggtataaccacgccgacgccgagtttcaggagcgtctgcaagaagatacgtcttttgggggcaacctcgggcgagcagtcttccaggccaagaagcgggttctcgaacctctcggtctggttgaggaaggcgctaagacggctcctggaaagaaacgtccggtagagcagtcgccacaagagccagactcctcctcgggcatcggcaagacaggccagcagcccgctaaaaagagactcaattttggtcagactggcgactcagagtcagtccccgacccacaacctctcggagaacctccagcaacccccgctgctgtgggacctactacaatggcttcaggcggtggcgcaccaatggcagacaataacgaaggcgccgacggagtgggtaatgcctcaggaaattggcattgcgattccacatggctgggcgacagagtcatcaccaccagcacccgaacatgggccttgcccacctataacaaccacctctacaagcaaatctccagtgcttcaacgggggccagcaacgacaaccactacttcggctacagcaccccctgggggtattttgatttcaacagattccactgccatttctcaccacgtgactggcagcgactcatcaacaacaattggggattccggcccaagagactcaacttcaagctcttcaacatccaagtcaaggaggtcacgacgaatgatggcgtcacgaccatcgctaataaccttaccagcacggttcaagtcttctcggactcggagtaccagctgccgtacgttctcggctctgcccaccagggctgcctgcctccgttcccggcggacgtgttcatgattccccagtacggctacctaacactcaacaacggtagtcaggccgtgggacgctcctccttctactgcctggaatactttccttcgcagatgctgagaaccggcaacaacttccagtttacttacaccttcgaggacgtgcctttccacagcagctacgcccacagccagagcttggaccggctgatgaatcctctgattgaccagtacctgtactacttgtctcggactcaaacaacaggaggcacggcaaatacgcagactctgggcttcagccaaggtgggcctaatacaatggccaatcaggcaaagaactggctgccaggaccctgttaccgccaacaacgcgtctcaacgacaaccgggcaaaacaacaatagcaattttacctggactggtgcttcaaaatataacctcaatgggcgtgaatccatcatcaaccctggcactgctatggcctcacacaaagacgacgaagacaagttctttcccatgagcggtgtcatgatttttggaaaagagagcgccggagcttcaaacactgcattggacaatgtcatgattacagacgaagaggaaattaaagccactaaccctgtggccaccgaaagatttgggaccgtggcagtcaatttccagagcagcagcacagaccctgcgaccggagatgtgcatgctatgggagcattacctggcatggtgtggcaagatagagacgtgtacctgcagggtcccatttgggccaaaattcctcacacagatggacactttcacccgtctcctcttatgggcggctttggactcaagaacccgcctcctcagatcctcatcaaaaacacgcctgttcctgcgaatcctccggcggagttttcagctacaaagtttgcttcattcatcacccaatactccacaggacaagtgagtgtggaaattgaatgggagctgcagaaagaaaacagcaagcgctggaatcccgaagtgcagtacacatccaattatgcaaaatctgccaacgttgattttactgtggacaacaatggactttatactgagcctcgccccattggcacccgttacctcacccgtcccctgtaa

SEQ ID NO: 353 - protein, 736 aa, Artificial Sequence
  Description of Artificial Sequence: Synthetic polypeptide
MAADGYLPDWLEDNLSEGIREWWDLKPGAPKPKANQQKQDDGRGLVLPGYKYLGPFNGLDKGEPVNAADAAALEHDKAYDQQLKAGDNPYLRYNHADAEFQERLQEDTSFGGNLGRAVFQAKKRVLEPLGLVEEGAKTAPGKKRPVEQSPQEPDSSSGIGKTGQQPAKKRLNFGQTGDSESVPDPQPLGEPPATPAAVGPTTMASGGGAPMADNNEGADGVGNASGNWHCDSTWLGDRVITTSTRTWALPTYNNHLYKQISSASTGASNDNHYFGYSTPWGYFDFNRFHCHFSPRDWQRLINNNWGFRPKRLNFKLFNIQVKEVTTNDGVTTIANNLTSTVQVFSDSEYQLPYVLGSAHQGCLPPFPADVFMIPQYGYLTLNNGSQAVGRSSFYCLEYFPSQMLRTGNNFQFTYTFEDVPFHSSYAHSQSLDRLMNPLIDQYLYYLSRTQTTGGTANTQTLGFSQGGPNTMANQAKNWLPGPCYRQQRVSTTTGQNNNSNFTWTGASKYNLNGRESIINPGTAMASHKDDEDKFFPMSGVMIFGKESAGASNTALDNVMITDEEEIKATNPVATERFGTVAVNFQSSSTDPATGDVHAMGALPGMVWQDRDVYLQGPIWAKIPHTDGHFHPSPLMGGFGLKNPPPQILIKNTPVPANPPAEFSATKFASFITQYSTGQVSVEIEWELQKENSKRWNPEVQYTSNYAKSANVDFTVDNNGLYTEPRPIGTRYLTRPL

SEQ ID NO: 354 - DNA, 2211 bp, Artificial Sequence
  Description of Artificial Sequence: Synthetic polynucleotide
atggctgctgacggttatcttccagattggctcgaggacaacctttctgaaggcattcgagagtggtgggcgctgcaacctggagcccctaaacccaaggcaaatcaacaacatcaggacaacgctcggggtcttgtgcttccgggttacaaatacctcggacccggcaacggactcgacaagggggaacccgtcaacgcagcggacgcggcagccctcgagcacgacaaggcctacgaccagcagctcaaggccggtgacaacccctacctcaagtacaaccacgccgacgccgagttccaggagcggctcaaagaagatacgtcttttgggggcaacctcgggcgagcagtcttccaggccaaaaagaggcttcttgaacctcttggtctggttgaggaagcggctaagacggctcctggaaagaagaggcctgtagatcagtctcctcaggaaccggactcatcatctggtgttggcaaatcgggcaaacagcctgccagaaaaagactaaatttcggtcagactggcgactcagagtcagtcccagaccctcaacctctcggagaaccaccagcagcccccacaagtttgggatctaatacaatggcttcaggcggtggcgcaccaatggcagacaataacgagggtgccgatggagtgggtaattcctcaggaaattggcattgcgattcccaatggctgggcgacagagtcatcaccaccagcaccagaacctgggccctgcccacttacaacaaccatctctacaagcaaatctccagccaatcaggagcttcaaacgacaaccactactttggctacagcaccccttgggggtattttgactttaacagattccactgccacttctcaccacgtgactggcagcgactcattaacaacaactggggattccggcccaagaaactcagcttcaagctcttcaacatccaagttaaagaggtcacgcagaacgatggcacgacgactattgccaataaccttaccagcacggttcaagtgtttacggactcggagtatcagctcccgtacgtgctcgggtcggcgcaccaaggctgtctcccgccgtttccagcggacgtcttcatggtccctcagtatggatacctcaccctgaacaacggaagtcaagcggtgggacgctcatccttttactgcctggagtacttcccttcgcagatgctaaggactggaaataacttccaattcagctataccttcgaggatgtaccttttcacagcagctacgctcacagccagagtttggatcgcttgatgaatcctcttattgatcagtatctgtactacctgaacagaacgcaaggaacaacctctggaacaaccaaccaatcacggctgctttttagccaggctgggcctcagtctatgtctttgcaggccagaaattggctacctgggccctgctaccggcaacagagactttcaaagactgctaacgacaacaacaacagtaactttccttggacagcggccagcaaatatcatctcaatggccgcgactcgctggtgaatccaggaccagctatggccagtcacaaggacgatgaagaaaaatttttccctatgcacggcaatctaatatttggcaaagaagggacaacggcaagtaacgcagaattagataatgtaatgattacggatgaagaagagattcgtaccaccaatcctgtggcaacagagcagtatggaactgtggcaaataacttgcagagctcaaatacagctcccacgactagaactgtcaatgatcagggggccttacctggcatggtgtggcaagatcgtgacgtgtaccttcaaggacctatctgggcaaagattcctcacacggatggacactttcatccttctcctctgatgggaggctttggactgaaacatccgcctcctcaaatcatgatcaaaaatactccggtaccggcaaatcctccgacgactttcagcccggccaagtttgcttcatttatcactcagtactccactggacaggtcagcgtggaaattgagtgggagctacagaaagaaaacagcaaacgttggaatccagagattcagtacacttccaactacaacaagtctgttaatgtggactttactgtagacactaatggtgtttatagtgaacctcgccccattggcacccgttaccttacccgtcccctgtaa

SEQ ID NO: 355 - protein, 736 aa, Artificial Sequence
  Description of Artificial Sequence: Synthetic polypeptide
MAADGYLPDWLEDNLSEGIREWWALQPGAPKPKANQQHQDNARGLVLPGYKYLGPGNGLDKGEPVNAADAAALEHDKAYDQQLKAGDNPYLKYNHADAEFQERLKEDTSFGGNLGRAVFQAKKRLLEPLGLVEEAAKTAPGKKRPVDQSPQEPDSSSGVGKSGKQPARKRLNFGQTGDSESVPDPQPLGEPPAAPTSLGSNTMASGGGAPMADNNEGADGVGNSSGNWHCDSQWLGDRVITTSTRTWALPTYNNHLYKQISSQSGASNDNHYFGYSTPWGYFDFNRFHCHFSPRDWQRLINNNWGFRPKKLSFKLFNIQVKEVTQNDGTTTIANNLTSTVQVFTDSEYQLPYVLGSAHQGCLPPFPADVFMVPQYGYLTLNNGSQAVGRSSFYCLEYFPSQMLRTGNNFQFSYTFEDVPFHSSYAHSQSLDRLMNPLIDQYLYYLNRTQGTTSGTTNQSRLLFSQAGPQSMSLQARNWLPGPCYRQQRLSKTANDNNNSNFPWTAASKYHLNGRDSLVNPGPAMASHKDDEEKFFPMHGNLIFGKEGTTASNAELDNVMITDEEEIRTTNPVATEQYGTVANNLQSSNTAPTTRTVNDQGALPGMVWQDRDVYLQGPIWAKIPHTDGHFHPSPLMGGFGLKHPPPQIMIKNTPVPANPPTTFSPAKFASFITQYSTGQVSVEIEWELQKENSKRWNPEIQYTSNYNKSVNVDFTVDTNGVYSEPRPIGTRYLTRPL

SEQ ID NO: 356 - DNA, 2211 bp, Artificial Sequence
  Description of Artificial Sequence: Synthetic polynucleotide
atggctgccgatggttatcttccagattggctcgaggacaaccttagtgaaggaattcgcgagtggtgggctttgaaacctggagcccctcaacccaaggcaaatcaacaacatcaagacaacgctcgaggtcttgtgcttccgggttacaaataccttggacccggcaacggactcgacaagggggagccggtcaacgcagcagacgcggcggccctcgagcacgacaaggcctacgaccagcagctcaaggccggagacaacccgtacctcaagtacaaccacgccgacgccgagttccaggagcggctcaaagaagatacgtcttttgggggcaacctcgggcgagcagtcttccaggccaaaaagaggcttcttgaacctcttggtctggttgaggaagcggctaagacggctcctggaaagaagagaccggtagagccatcaccccagcgttctccagactcctctacgggcatcggcaagaaaggccaacagcccgctaaaaagagactcaattttggtcagactggcgactcagagtcagtccccgacccacaacctctcggagaacctccagcaacccccgctgctgtgggacctactacaatggcttcaggcggtggcgcaccaatggcagacaataacgagggtgccgatggagtgggtaattcctcaggaaattggcattgcgattcccaatggctgggcgacagagtcatcaccaccagcaccagaacctgggccctgcccacttacaacaaccatctctacaagcaaatctccagccaatcaggagcttcaaacgacaaccactactttggctacagcaccccttgggggtattttgactttaacagattccactgccacttttcaccacgtgactggcaaagactcatcaacaacaactggggattccgacccaagagactcaacttcaagctcttcaacatccaagtcaaggaggtcacgacgaatgatggcgtcacgaccatcgctaataaccttaccagcacggttcaagtcttctcggactcggagtaccagttgccgtacgtcctcggctctgcgcaccagggctgcctccctccgttcccggcggacgtgttcatgattccgcagtacggctacctaacgctcaacaatggcagccaagccgtgggacgttcatccttttactgcctggaatatttcccttctcagatgctgagaacgggcaacaactttaccttcagctacacttttgaggacgttcctttccacagcagctacgctcacagccagagtctggaccgtctcatgaatcctctcatcgaccagtacctgtattacttgagcagaacaaacactccaagtggaaccaccacgcagtcaaggcttcagttttctcaggccggagcgagtgacattcgggaccagtctaggaactggcttcctggaccctgttaccgccagcagcgcgtttctaaaacaaaaacagacaacaacaacagcaattttacctggactggtgcttcaaaatataaccttaatgggcgtgaatctataatcaaccctggcactgctatggcctcacacaaagacgacgaagacaagttctttcccatgagcggtgtcatgatttttggaaaagagagcgccggagcttcaaacactgcattggacaatgtcatgattacagacgaagaggaaattaaagccactaaccctgtggccaccgaaagatttgggaccgtggcagtcaatttccagagcagcagcacagaccctgcgaccggagatgtgcatgttatgggagccttacctggaatggtgtggcaagacagagacgtatacctgcagggtcctatttgggccaaaattcctcacacggatggacactttcacccgtctcctcttatgggcggctttggactcaagaacccgcctcctcagatcctcatcaaaaacacgcctgttcctgcgaatcctccggcggagttttcagctacaaagtttgcttcattcatcacccaatactccacaggacaagtgagtgtggaaattgaatgggagctgcagaaagaaaacagcaagcgctggaatcccgaagtgcagtacacatccaattatgcaaaatctgccaacgttgattttactgtggacaacaatggactttatactgagcctcgccccattggcacccgttaccttacccgtcccctgtaa

SEQ ID NO: 357 - protein, 736 aa, Artificial Sequence
  Description of Artificial Sequence: Synthetic polypeptide
MAADGYLPDWLEDNLSEGIREWWALKPGAPQPKANQQHQDNARGLVLPGYKYLGPGNGLDKGEPVNAADAAALEHDKAYDQQLKAGDNPYLKYNHADAEFQERLKEDTSFGGNLGRAVFQAKKRLLEPLGLVEEAAKTAPGKKRPVEPSPQRSPDSSTGIGKKGQQPAKKRLNFGQTGDSESVPDPQPLGEPPATPAAVGPTTMASGGGAPMADNNEGADGVGNSSGNWHCDSQWLGDRVITTSTRTWALPTYNNHLYKQISSQSGASNDNHYFGYSTPWGYFDFNRFHCHFSPRDWQRLINNNWGFRPKRLNFKLFNIQVKEVTTNDGVTTIANNLTSTVQVFSDSEYQLPYVLGSAHQGCLPPFPADVFMIPQYGYLTLNNGSQAVGRSSFYCLEYFPSQMLRTGNNFTFSYTFEDVPFHSSYAHSQSLDRLMNPLIDQYLYYLSRTNTPSGTTTQSRLQFSQAGASDIRDQSRNWLPGPCYRQQRVSKTKTDNNNSNFTWTGASKYNLNGRESIINPGTAMASHKDDEDKFFPMSGVMIFGKESAGASNTALDNVMITDEEEIKATNPVATERFGTVAVNFQSSSTDPATGDVHVMGALPGMVWQDRDVYLQGPIWAKIPHTDGHFHPSPLMGGFGLKNPPPQILIKNTPVPANPPAEFSATKFASFITQYSTGQVSVEIEWELQKENSKRWNPEVQYTSNYAKSANVDFTVDNNGLYTEPRPIGTRYLTRPL

SEQ ID NO: 358 - DNA, 2211 bp, Artificial Sequence
  Description of Artificial Sequence: Synthetic polynucleotide
atggctgccgatggttatcttccagattggctcgaggacaacctctctgagggcattcgcgagtggtgggacttgaaacctggagcccctaaacccaaggcaaatcaacaacatcaggacaacgctcgaggtcttgtgcttccgggttacaaataccttggacccggcaacggactcgacaagggggagccggtcaacgcagcagacgcggcggccctcgagcacgacaaggcctacgaccagcagctcaaggccggagacaacccgtacctcaagtacaaccacgccgacgccgagttccaggagcggctcaaagaagatacgtcttttgggggcaacctcgggcgagcagtcttccaggccaaaaagaggcttcttgaacctcttggtctggttgaggaagcggctaagacggctcctggaaagaagagaccggtagagccatcaccccagcgttctccagactcctctacgggcatcggcaagaaaggccaacagcccgctaaaaagagactcaattttggtcagactggcgactcagagtcagtccccgacccacaacctctcggagaacctccagcaacccccgctgctgtgggacctactacaatggcttcaggcggtggcgcaccaatggcagacaataacgagggtgccgatggagtgggtaattcctcaggaaattggcattgcgattcccaatggctgggcgacagagtcatcaccaccagcaccagaacctgggccctgcccacttacaacaaccatctctacaagcaaatctccagccaatcaggagcttcaaacgacaaccactactttggctacagcaccccttgggggtattttgactttaacagattccactgccacttttcaccacgtgactggcaaagactcatcaacaacaactggggattccgacccaagagactcaacttcaagctcttcaacatccaagtcaaggaggtcacgacgaatgatggcgtcacgaccatcgctaataaccttaccagcacggttcaagtcttctcggactcggagtaccagttgccgtacgtcctcggctctgcgcaccagggctgcctccctccgttcccggcggacgtgttcatgattccgcagtacggctacctaacgctcaacaatggcagccaagccgtgggacgttcatccttttactgcctggaatatttcccttctcagatgctgagaacgggcaacaactttaccttcagctacacttttgaggacgttcctttccacagcagctacgctcacagccagagtctggaccgtctcatgaatcccctcatcgaccagtacctgtattacttgagcagaacaaacactccaagtggaaccaccacgcagtcaaggcttcagttttctcaggccggagcgagtgacattcgggaccagtctaggaactggcttcctggaccctgttaccggcagcagcgcgtttctaaaacaaaaacagacaacaacaacagcaactttacctggactggtgcttcaaaatataaccttaatgggcgtgaatctataatcaaccctggcactgctatggcctcacacaaagacgacgaagacaagttctttcccatgagcggtgtcatgatttttggaaaggagagcgccggagcttcaaacactgcattggacaatgtcatgatcacagacgaagaggaaatcaaagccactaaccccgtggccaccgaaagatttgggactgtggcagtcaatctccagagcagcagcacagaccctgcgaccggagatgtgcatgttatgggagccttacctggaatggtgtggcaagacagagacgtgtacctgcagggtcctatttgggccaaaattcctcacacggatggacactttcacccgtctcctctcatgggcggctttggacttaagcacccgcctcctcagatcctcatcaaaaacacgcctgttcctgcgaatcctccggcagagttttcggctacaaagtttgcttcattcatcacccagtattccacaggacaagtgagtgtggaaattgaatgggagctgcagaaagaaaacagcaagcgctggaatcccgaagtgcagtacacatccaattatgcaaaatctgccaacgttgattttactgtggacaacaatggactttatactgagcctcgccccattggcacccgttacctcacccgtcccctgtaa

SEQ ID NO: 359 - protein, 736 aa, Artificial Sequence
  Description of Artificial Sequence: Synthetic polypeptide
MAADGYLPDWLEDNLSEGIREWWDLKPGAPKPKANQQHQDNARGLVLPGYKYLGPGNGLDKGEPVNAADAAALEHDKAYDQQLKAGDNPYLKYNHADAEFQERLKEDTSFGGNLGRAVFQAKKRLLEPLGLVEEAAKTAPGKKRPVEPSPQRSPDSSTGIGKKGQQPAKKRLNFGQTGDSESVPDPQPLGEPPATPAAVGPTTMASGGGAPMADNNEGADGVGNSSGNWHCDSQWLGDRVITTSTRTWALPTYNNHLYKQISSQSGASNDNHYFGYSTPWGYFDFNRFHCHFSPRDWQRLINNNWGFRPKRLNFKLFNIQVKEVTTNDGVTTIANNLTSTVQVFSDSEYQLPYVLGSAHQGCLPPFPADVFMIPQYGYLTLNNGSQAVGRSSFYCLEYFPSQMLRTGNNFTFSYTFEDVPFHSSYAHSQSLDRLMNPLIDQYLYYLSRTNTPSGTTTQSRLQFSQAGASDIRDQSRNWLPGPCYRQQRVSKTKTDNNNSNFTWTGASKYNLNGRESIINPGTAMASHKDDEDKFFPMSGVMIFGKESAGASNTALDNVMITDEEEIKATNPVATERFGTVAVNLQSSSTDPATGDVHVMGALPGMVWQDRDVYLQGPIWAKIPHTDGHFHPSPLMGGFGLKHPPPQILIKNTPVPANPPAEFSATKFASFITQYSTGQVSVEIEWELQKENSKRWNPEVQYTSNYAKSANVDFTVDNNGLYTEPRPIGTRYLTRPL

SEQ ID NO: 360 - DNA, 2214 bp, Artificial Sequence
  Description of Artificial Sequence: Synthetic polynucleotide
atggctgccgatggttatcttccagattggctcgaggacaaccttagtgaaggaattcgcgagtggtgggctttgaaacctggagcccctcaacccaaggcaaatcaacaacatcaagacaacgctcgaggtcttgtgcttccgggttacaaataccttggacccggcaacggactcgacaagggggagccggtcaacgcagcagacgcggcggccctcgagcacgacaaggcctacgaccagcagctgcaggcgggtgacaatccgtacctgcggtataaccacgccgacgccgagtttcaggagcgtctgcaagaagatacgtcttttgggggcaaccttggcagagcagtcttccaggccaaaaagaggatccttgagcctcttggtctggttgaggaagcagctaaaacggctcctggaaagaagaggcctgtagatcagtctcctcaggaaccggactcatcatctggtgttggcaaatcgggcaaacagcctgccagaaaaagactaaatttcggtcagactggcgactcagagtcagtcccagaccctcaacctctcggagaaccaccagcagcccccacaagtttgggatctaatacaatggcttcaggcggtggcgcaccaatggcagacaataacgagggtgccgatggggtgggtagttcctcgggaaattggcattgcgattcccaatgactgggggacagagtcatcaccaccagcacccgaacctgggccctgcccacctacaacaatcacctctacaagcaaatctccaacgggacatcgggaggagccaccaacgacaacacctacttcggctacagcaccccctgggggtattttgactttaacagattccactgccacttttcaccacgtgactggcagcgactcatcaacaacaactggggattccggcccaagagactcagcttcaagctcttcaacatccaggtcaaggaggtcacgcagaatgaaggcaccaagaccatcgccaataacctcaccagcaccatccaggtgtttacggactcggagtaccagctgccgtacgttctcggctctgcgcaccagggctgcctccctccgttcccggcggacgtgttcatgattccgcaatacggctacctgacgctcaacaatggcagccaagccgtgggacgttcatccttttactgcctggaatatttcccttctcagatgctgagaacgggcaacaactttaccttcagctacacctttgaggaagtgcctttccacagcagctacgcgcacagccagagcttggaccggctgatgaatcctctgattgaccagtacctgtactacttgtctcggactcaaacaacaggaggcacggcaaatacgcagactctgggcttcagccaaggtgggcctaatacaatggccaatcaggcaaagaactggctgccaggaccctgttaccgccaacaacgcgtctcaacgacaaccgggcaaaacaacaatagcaactttgcctggactgctgggaccaaataccatctgaatggaagaaattcattggctaatcctggcatcgctatggcaacacacaaagacgacgaggagcgtttttttcccagtaacgggatcctgatttttggcaaacaaaatgctgccagagacaatgcggattacagcgatgtcatgctcaccagcgaggaagaaatcaaaaccactaaccctgtggctacagaggaatacggtatcgtggcagataacttgcagcagcaaaacacggctcctcaaattggaactgtcaacagccagggggccttacccggtatggtctggcagaaccgggacgtgtacctgcagggtcccatctgggccaagattcctcacacggacggcaacttccacccgtctccgctgatgggcggctttggcctgaaacatcctccgcctcagatcctgatcaagaacacgcctgtacctgcggatcctccgaccaccttcaaccagtcaaagctgaactctttcatcacgcaatacagcaccggacaggtcagcgtggagatcgagtgggagctgcagaaggaaaacagcaagcgctggaacccggagatccagtacacttccaactattacaagtctaataatgttgaatttgctgttaatactgaaggtgtatatagtgaaccccgccccattggcaccagatacctgactcgtaatctgtaa

SEQ ID NO: 361 - protein, 736 aa, Artificial Sequence
  Description of Artificial Sequence: Synthetic polypeptide
MAADGYLPDWLEDNLSEGIREWWALKPGAPQPKANQQHQDNARGLVLPGYKYLGPGNGLDKGEPVNAADAAALEHDKAYDQQLQAGDNPYLRYNHADAEFQERLQEDTSFGGNLGRAVFQAKKRILEPLGLVEEAAKTAPGKKRPVDQSPQEPDSSSGVGKSGKQPARKRLNFGQTGDSESVPDPQPLGEPPAAPTSLGSNTMASGGGAPMADNNEGADGVGSSSGNWHCDSQLGDRVITTSTRTWALPTYNNHLYKQISNGTSGGATNDNTYFGYSTPWGYFDFNRFHCHFSPRDWQRLINNNWGFRPKRLSFKLFNIQVKEVTQNEGTKTIANNLTSTIQVFTDSEYQLPYVLGSAHQGCLPPFPADVFMIPQYGYLTLNNGSQAVGRSSFYCLEYFPSQMLRTGNNFTFSYTFEEVPFHSSYAHSQSLDRLMNPLIDQYLYYLSRTQTTGGTANTQTLGFSQGGPNTMANQAKNWLPGPCYRQQRVSTTTGQNNNSNFAWTAGTKYHLNGRNSLANPGIAMATHKDDEERFFPSNGILIFGKQNAARDNADYSDVMLTSEEEIKTTNPVATEEYGIVADNLQQQNTAPQIGTVNSQGALPGMVWQNRDVYLQGPIWAKIPHTDGNFHPSPLMGGFGLKHPPPQILIKNTPVPADPPTTFNQSKLNSFITQYSTGQVSVEIEWELQKENSKRWNPEIQYTSNYYKSNNVEFAVNTEGVYSEPRPIGTRYLTRNL

SEQ ID NO: 362 - DNA, 2214 bp, Artificial Sequence
  Description of Artificial Sequence: Synthetic polynucleotide
atggctgccgatggttatcttccagattggctcgaggacaaccttagtgaaggaattcgcgagtggtgggctttgaaacctggagcccctcaacccaaggcaaatcaacaacatcaagacaacgctcgaggtcttgtgcttccgggttacaaataccttggacccggcaacggactcgacaagggggagccggtcaacgcagcagacgcggcggccctcgagcacgacaaggcctacgaccagcagctgcaggcgggtgacaatccgtacctgcggtataaccacgccgacgccgagtttcaggagcgtctgcaagaagatacgtcttttgggggcaaccttggcagagcagtcttccaggccaaaaagaggatccttgagcctcttggtctggttgaggaagcagctaaaacggctcctggaaagaagaggcctgtagatcagtctcctcaggaaccggactcatcatctggtgttggcaaatcgggcaaacagcctgccagaaaaagactaaatttcggtcagactggcgactcagagtcagtcccagaccctcaacctctcggagaaccaccagcagcccccacaagtttgggatctaatacaatggcttcaggcggtggcgcaccaatggcagacaataacgagggtgccgatggggtgggtagttcctcgggaaattggcattgcgattcccaatggctgggggacagagtcatcaccaccagcacccgaacctgggccctgcccacctacaacaatcacctctacaagcaaatctccaacgggacatcgggaggagccaccaacgacaacacctacttcggctacagcaccccctgggggtattttgactttaacagattccactgccacttttcaccacgtgactggcagcgactcatcaacaacaactggggattccggcccaagagactcagcttcaagctcttcaacatccaggtcaaggaggtcacgcagaatgaaggcaccaagaccatcgccaataacctcaccagcaccatccaggtgtttacggactcggagtaccagctgccgtacgttctcggctctgcgcaccagggctgcctccctccgttcccggcggacgtgttcatgattccgcaatacggctacctgacgctcaacaatggcagccaagccgtgggacgttcatccttttactgcctggaatatttcccttctcagatgctgagaacgggcaacaactttaccttcagctacacctttgaggaagtgccttttcacagcagctacgcgcacagccagagcttggaccggctgatgaatcctctgattgaccagtacctgtactacttgtctcggactcaaacaacaggaggcacggcaaatacgcagactctgggcttcagccaaggtgggcctaatacaatggccaatcaggcaaagaactggctgccaggaccctgttaccgccaacaacgcgtctcaacgacaaccgggcaaaacaacaatagcaactttgcctggactgctgggaccaaataccatctgaatggaagaaattcattggctaatcctggcatcgctatggcaacacacaaagacgacgaggagcgtttttttcccagtaacgggatcctgatttttggcaaacaaaatgctgccagagacaatgcggattacagcgatgtcatgctcaccagcgaggaagaaatcaaaaccactaaccctgtggctacagaggaatacggtatcgtggcagataacttgcagcagcaaaacacggctcctcaaattggaactgtcaacagccagggggccttacccggtatggtctggcagaaccgggacgtgtacctgcagggtcccatctgggccaagattcctcacacggacggcaacttccacccgtctccgctgatgggcggctttggcctgaaacatcctccgcctcagatcctgatcaagaacacgcctgtacctgcggatcctccgaccaccttcaaccagtcaaagctgaactctttcatcacgcaatacagcaccggacaggtcagcgtggagatcgagtgggagctgcagaaggaaaacagcaagcgctggaacccggagatccagtacacttccaactattacaagtctaataatgttgaatttgctgttaatactgaaggtgtatatagtgaaccccgccccattggcaccagatacctgactcgtaatctgtaa

SEQ ID NO: 363 - protein, 737 aa, Artificial Sequence; identical to SEQ ID NO: 351
  Description of Artificial Sequence: Synthetic polypeptide

SEQ ID NO: 364 - DNA, 2211 bp, Artificial Sequence
  Description of Artificial Sequence: Synthetic polynucleotide
atggctgccgatggttatcttccagattggctcgaggacaacctctctgagggcattcgcgagtggtgggacttgaaacctggagcccctaaacccaaggcaaatcaacaacatcaggacaacgctcgaggtcttgtgcttccgggttacaaataccttggacccggcaacggactcgacaagggggagccggtcaacgcagcagacgcggcggccctcgagcacgacaaggcctacgaccagcagctcaaggccggagacaacccgtacctcaagtacaaccacgccgacgccgagttccaggagcggctcaaagaagatacgtcttttgggggcaacctcgggcgagcagtcttccaggccaaaaagaggcttcttgaacctcttggtctggttgaggaagcggctaagacggctcctggaaagaagagaccggtagagccatcaccccagcgttctccagactcctctacgggcatcggcaagaaaggccaacagcccgctaaaaagagactcaattttggtcagactggcgactcagagtcagtccccgacccacaacctctcggagaacctccagcaacccccgctgctgtgggacctactacaatggcttcaggcggtggcgcaccaatggcagacaataacgagggtgccgatggagtgggtaattcctcaggaaattggcattgcgattcccaatggctgggcgacagagtcatcaccaccagcaccagaacctgggccctgcccacttacaacaaccatctctacaagcaaatctccagccaatcaggagcttcaaacgacaaccactactttggctacagcaccccttgggggtattttgactttaacagattccactgccacttttcaccacgtgactggcaaagactcatcaacaacaactggggattccgacccaagagactcaacttcaagctcttcaacatccaagtcaaggaggtcacgacgaatgatggcgtcacgaccatcgctaataaccttaccagcacggttcaagtcttctcggactcggagtaccagttgccgtacgtcctcggctctgcgcaccagggctgcctccctccgttcccggcggacgtgttcatgattccgcagtacggctacctaacgctcaacaatggcagccaagccgtgggacgttcatccttttactgcctggaatatttcccttctcagatgctgagaacgggcaacaactttaccttcagctacacttttgaggacgttcctttccacagcagctacgctcacagccagagtctggaccgtctcatgaatcctctcatcgaccagtacctgtattacttgagcagaacaaacactccaagtggaaccaccacgcagtcaaggcttcagttttctcaggccggagcgagtgacattcgggaccagtctaggaactggcttcctggaccctgttaccgccagcagcgcgtttctaaaacaaaaacagacaacaacaacagcaattttacctggactggtgcttcaaaatataaccttaatgggcgtgaatctataatcaaccctggcactgctatggcctcacacaaagacgacgaagacaagttctttcccatgagcggtgtcatgatttttggaaaagagagcgccggagcttcaaacactgcattggacaatgtcatgattacagacgaagaggaaattaaagccactaaccctgtggccaccgaaagatttgggaccgtggcagtcaatttccagagcagcagcacagaccctgcgaccggagatgtgcatgctatgggagcattacctggcatggtgtggcaagatagagacgtgtacctgcagggtcccatttgggccaaaattcctcacacagatggacactttcacccgtctcctcttatgggcggctttggactcaagaacccgcctcctcagatcctcatcaaaaacacgcctgttcctgcgaatcctccggcggagttttcagctacaaagtttgcttcattcatcacccaatactccacaggacaagtgagtgtggaaattgaatgggagctgcagaaagaaaacagcaagcgctggaatcccgaagtgcagtacacatccaattatgcaaaatctgccaacgttgattttactgtggacaacaatggactttatactgagcctcgccccattggcacccgttaccttacccgtcccctgtaa

SEQ ID NO: 365 - protein, 736 aa, Artificial Sequence
  Description of Artificial Sequence: Synthetic polypeptide
MAADGYLPDWLEDNLSEGIREWWDLKPGAPKPKANQQHQDNARGLVLPGYKYLGPGNGLDKGEPVNAADAAALEHDKAYDQQLKAGDNPYLKYNHADAEFQERLKEDTSFGGNLGRAVFQAKKRLLEPLGLVEEAAKTAPGKKRPVEPSPQRSPDSSTGIGKKGQQPAKKRLNFGQTGDSESVPDPQPLGEPPATPAAVGPTTMASGGGAPMADNNEGADGVGNSSGNWHCDSQWLGDRVITTSTRTWALPTYNNHLYKQISSQSGASNDNHYFGYSTPWGYFDFNRFHCHFSPRDWQRLINNNWGFRPKRLNFKLFNIQVKEVTTNDGVTTIANNLTSTVQVFSDSEYQLPYVLGSAHQGCLPPFPADVFMIPQYGYLTLNNGSQAVGRSSFYCLEYFPSQMLRTGNNFTFSYTFEDVPFHSSYAHSQSLDRLMNPLIDQYLYYLSRTNTPSGTTTQSRLQFSQAGASDIRDQSRNWLPGPCYRQQRVSKTKTDNNNSNFTWTGASKYNLNGRESIINPGTAMASHKDDEDKFFPMSGVMIFGKESAGASNTALDNVMITDEEEIKATNPVATERFGTVAVNFQSSSTDPATGDVHAMGALPGMVWQDRDVYLQGPIWAKIPHTDGHFHPSPLMGGFGLKNPPPQILIKNTPVPANPPAEFSATKFASFITQYSTGQVSVEIEWELQKENSKRWNPEVQYTSNYAKSANVDFTVDNNGLYTEPRPIGTRYLTRPL

SEQ ID NO: 366 - DNA, 2211 bp, Artificial Sequence
  Description of Artificial Sequence: Synthetic polynucleotide
atggctgccgatggttatcttccagattggctcgaggacaaccttagtgaaggaattcgcgagtggtgggcgctgaaacctggagccccgaagcccaaagccaaccagcaaaagcaggacgacggccggggtctggtgcttccgggttacaaatacctcggacccggtaacggactcgacaaaggagagccggtcaacgaggcggacgcggcagccctcgagcacgacaaggcctacgaccagcagctcaaagcgggtgacaatccgtacctgcggtataaccacgccgacgccgagtttcaggagcgtctgcaagaagatacgtcttttgggggcaacctcgggcgagcagtcttccaggccaagaagcgggttctcgaacctctcggtctggttgaggaaggcgctaagacggctcccggaaagaaacgtccggtagagcagtcgccacaagagccagactcctctacgggcatcggcaagaaaggccaacagcccgccagaaaaagactcaatttcggtcagactggcgactcagagtcagttccagaccctcaacctctcggagaacctccagcagcgccctctggtgtgggacctactacaatggcttcaggcggtggcgcaccaatggcagacaataacgaaggcgccgacggagtgggtaatgcctcaggaaattggcattgcgattccacatggctgggcgacagagtcatcaccaccagcacccgaacatgggccttgcccacctataacaaccacctctacaagcaaatctccagtgcttcaacgggggccagcaacgacaacacctacttcggctacagcaccccctgggggtattttgatttcaacagattccactgccatttctcaccacgtgactggcagcgactcatcaacaacaattggggattccggcccaagagactcaacttcaaactcttcaacatccaagtcaaggaggtcacgacgaatgatggcgtcacgaccatcgctaataaccttaccagcacggttcaagtcttctcggactcggagtaccagttgccgtacgtcctcggctctgcgcaccagggctgcctccctccgttcccggcggacgtgttcatgattccgcagtacggctacctaacgctcaacaatggcagccaggcagtgggacggtcatccttttactgcctggaatatttcccatcgcagatgctgagaacgggcaataactttaccttcagctacaccttcgaggacgtgcctttccacagcagctacgcgcacagccagagcctggaccggctgatgaatcctctcatcgaccagtacctgtattacctgaacagaactcagaatcagtccggaagtgcccaaaacaaggacttgctgtttagccgggggtctccagctggcatgtctgttcagcccaaaaactggctacctggaccctgttatcggcagcagcgcgtttctaaaacaaaaacagacaacaacaacagcaattttacctggactggtgcttcaaaatataacctcaatgggcgtgaatccatcatcaaccctggcactgctatggcctcacacaaagacgacgaagacaagttctttcccatgagcggtgtcatgatttttggaaaagagagcgccggagcttcaaacactgcattggacaatgtcatgattacagacgaagaggaaattaaagccactaaccctgtggccaccgaaagatttgggaccgtggcagtcaatttccagagcagcagcacagaccctgcgaccggagatgtgcatgttatgggagccttacctggaatggtgtggcaagacagagacgtatacctgcagggtcctatttgggccaaaattcctcacacagatggacactttcacccgtctcctcttatgggcggctttggactcaagaacccgcctcctcagatcctcatcaaaaacacgcctgttcctgcgaatcctccggcagagttttcggctacaaagtttgcttcattcatcacccagtattccacaggacaagtgagcgtggagattgaatgggagctgcagaaagaaaacagcaaacgctggaatcccgaagtgcagtatacatctaactatgcaaaatctgccaacgttgatttcactgtggacaacaatggactttatactgagcctcgccccattggcacccgttacctcacccgtcccctgtaa

SEQ ID NO: 367 - protein, 736 aa, Artificial Sequence
  Description of Artificial Sequence: Synthetic polypeptide
MAADGYLPDWLEDNLSEGIREWWALKPGAPKPKANQQKQDDGRGLVLPGYKYLGPGNGLDKGEPVNEADAAALEHDKAYDQQLKAGDNPYLRYNHADAEFQERLQEDTSFGGNLGRAVFQAKKRVLEPLGLVEEGAKTAPGKKRPVEQSPQEPDSSTGIGKKGQQPARKRLNFGQTGDSESVPDPQPLGEPPAAPSGVGPTTMASGGGAPMADNNEGADGVGNASGNWHCDSTWLGDRVITTSTRTWALPTYNNHLYKQISSASTGASNDNTYFGYSTPWGYFDFNRFHCHFSPRDWQRLINNNWGFRPKRLNFKLFNIQVKEVTTNDGVTTIANNLTSTVQVFSDSEYQLPYVLGSAHQGCLPPFPADVFMIPQYGYLTLNNGSQAVGRSSFYCLEYFPSQMLRTGNNFTFSYTFEDVPFHSSYAHSQSLDRLMNPLIDQYLYYLNRTQNQSGSAQNKDLLFSRGSPAGMSVQPKNWLPGPCYRQQRVSKTKTDNNNSNFTWTGASKYNLNGRESIINPGTAMASHKDDEDKFFPMSGVMIFGKESAGASNTALDNVMITDEEEIKATNPVATERFGTVAVNFQSSSTDPATGDVHVMGALPGMVWQDRDVYLQGPIWAKIPHTDGHFHPSPLMGGFGLKNPPPQILIKNTPVPANPPAEFSATKFASFITQYSTGQVSVEIEWELQKENSKRWNPEVQYTSNYAKSANVDFTVDNNGLYTEPRPIGTRYLTRPL

SEQ ID NO: 368 - DNA, 2205 bp, Artificial Sequence
  Description of Artificial Sequence: Synthetic polynucleotide
atggctgctgacggttatcttccagattggctcgaggacaacctttctgaaggcattcgtgagtggtgggctctgaaacctggagtccctcaacccaaagcgaaccaacaacaccaggacaaccgtcggggtcttgtgcttccgggttacaaatacctcggacccggtaacggactcgacaaaggagagccggtcaacgaggcggacgcggcagccctcgaacacgacaaggcctacgaccagcagctcaaggccggagacaacccgtacctcaagtacaaccacgccgacgccgagttccaggagcggctcaaagaagatacgtcttttgggggcaacctcgggcgagcagtcttccaggccaaaaagaggcttcttgaacctcttggtctggttgaggaagcggctaagacggctcctggaaagaagaggcctgtagagcagtctcctcaggaaccggactcctccgcgggtattggcaaatcgggtgcacagcccgctaaaaagagactcaatttcggtcagactggcgacacagagtcagtcccagaccctcaaccaatcggagaacctcccgcagccccctcaggtgtgggatctcttacaatggcttcaggtggtggcgcaccagtggcagacaataacgaaggtgccgatggagtgggtagttcctcgggaaattggcattgcgattcccaatggctgggggacagagtcatcaccaccagcacccgaacctgggccctgcccacctacaacaaccacctctacaaacaaatttccagccaatcaggagcctcgaacgacaatcactactttggctacagcaccccttgggggtattttgacttcaacagattccactgccacttttcaccacgtgactggcagcgactcatcaacaacaactggggattccggcccaagagactcagcttcaagctcttcaacatccaggtcaaagaggttacggacaacaatggagtcaagaccatcgccaataaccttaccagcacggtccaggtcttcacggactcagactatcagctcccgtacgtgctcgggtcggctcacgagggctgcctcccgccgttcccagcggacgttttcatgattcctcagtacgggtatctgacgcttaatgatggaagccaggccgtgggtcgttcgtccttttactgcctggaatatttcccgtcgcaaatgctaagaacgggtaacaacttccagttcagctacgagtttgagaacgtacctttccatagcagctacgctcacagccaaagcctggaccgactaatgaatccactcatcgaccaatacttgtactatctctcaaagactattaacggttctggacagaatcaacaaacgctaaaattcagtgtggccggacccagcaacatggctgtccagggaagaaactacatacctggacccagctaccgacaacaacgtgtctcaaccactgtgactcaaaacaacaacagcgaatttgcttggcctggagcttcttcttgggctctcaatggacgtaatagcttgatgaatcctggacctgctatggccagccacaaagaaggagaggaccgtttctttcctttgtctggatctttaatttttggcaaacaaggaactggaagagacaacgtggatgcggacaaagtcatgataaccaacgaagaagaaattaaaactactaacccggtagcaacggagtcctatggacaagtggccacaaaccaccagagtgcccaagcacaggcgcagaccggctgggttcaaaaccaaggaatacttccgggtatggtttggcaggacagagatgtgtacctgcaaggacccatctgggccaagattcctcacacggacggcaacttccacccgtctccgctgatgggcggctttggcctgaaacatcctccgcctcagatcctgatcaagaacacgcctgtacctgcggatcctccgaccaccttcaaccagtcaaagctgaactctttcatcacgcaatacagcaccggacaggtcagcgtggaaattgaatgggagctgcagaaggaaaacagcaagcgctggaatcccgaagtgcagtatacatctaactatgcaaaatctgccaacgttgatttcactgtggacaacaatggactttatactgagcctcgccccattggcacccgttacctcacccgtcccctgtaa

SEQ ID NO: 369 - protein, 734 aa, Artificial Sequence
  Description of Artificial Sequence: Synthetic polypeptide
MAADGYLPDWLEDNLSEGIREWWALKPGVPQPKANQQHQDNRRGLVLPGYKYLGPGNGLDKGEPVNEADAAALEHDKAYDQQLKAGDNPYLKYNHADAEFQERLKEDTSFGGNLGRAVFQAKKRLLEPLGLVEEAAKTAPGKKRPVEQSPQEPDSSAGIGKSGAQPAKKRLNFGQTGDTESVPDPQPIGEPPAAPSGVGSLTMASGGGAPVADNNEGADGVGSSSGNWHCDSQWLGDRVITTSTRTWALPTYNNHLYKQISSQSGASNDNHYFGYSTPWGYFDFNRFHCHFSPRDWQRLINNNWGFRPKRLSFKLFNIQVKEVTDNNGVKTIANNLTSTVQVFTDSDYQLPYVLGSAHEGCLPPFPADVFMIPQYGYLTLNDGSQAVGRSSFYCLEYFPSQMLRTGNNFQFSYEFENVPFHSSYAHSQSLDRLMNPLIDQYLYYLSKTINGSGQNQQTLKFSVAGPSNMAVQGRNYIPGPSYRQQRVSTTVTQNNNSEFAWPGASSWALNGRNSLMNPGPAMASHKEGEDRFFPLSGSLIFGKQGTGRDNVDADKVMITNEEEIKTTNPVATESYGQVATNHQSAQAQAQTGWVQNQGILPGMVWQDRDVYLQGPIWAKIPHTDGNFHPSPLMGGFGLKHPPPQILIKNTPVPADPPTTFNQSKLNSFITQYSTGQVSVEIEWELQKENSKRWNPEVQYTSNYAKSANVDFTVDNNGLYTEPRPIGTRYLTRPL

SEQ ID NO: 370 - DNA, 2211 bp, Artificial Sequence
  Description of Artificial Sequence: Synthetic polynucleotide
atggctgccgatggttatcttccagattggctcgaggacaacctctctgagggcattcgcgagtggtgggcgctgaaacctggagccccgaagcccaaagccaaccagcaaaagcaggacgacggccggggtctggtgcttcctggctacaagtacctcggacccttcaacggactcgacaagggggagcccgtcaacgcggcggacgcagcggccctcgagcacgacaaggcctacgaccagcagctgcaggcgggtgacaatccgtacctgcggtataaccacgccgacgccgagtttcaggagcgtctgcaagaagatacgtcttttgggggcaacctcgggcgagcagtcttccaggccaagaagtgggttctcgaacctctcggtctggttgaggaaggcgctaagacggctcctggaaagaaacgtccggtagagcagtcgccacaagagccagactcctcctcgggcatcggcaagacaggccagcagcccgctaaaaagagactcaattttggtcagactggcgactcagagtcagtccccgacccacaacctctcggagaacctccagcaacccccgctgctgtgggacctactacaatggcttcaggcggtggcgcaccaatggcagacaataacgaaggcgccgacggagtgggtaatgcctcaggaaattggcattgcgattccacatggctgggcgacagagtcatcaccaccagcacccgcacctgggccttgcccacctacaataaccacctctacaagcaaatctccagtgcttcaacgggggccagcaacgacaaccactacttcggctacagcaccccctgggggtattttgatttcaacagattccactgccatttctcaccacgtgactggcagcgactcatcaacaacaattggggattccggcccaagagactcaacttcaagctcttcaacatccaagtcaaggaggtcacgacgaatgatggcgtcacaaccatcgctaataaccttaccagcacggttcaagtcttctcggactcggagtaccagcttccgtacgtcctcggctctgcgcaccagggctgcctccctccgttcccggcggacgtgttcatgattccgcaatacggctacctgacgctcaacaatggcagccaagccgtgggacgttcatccttttactgcctggaatatttcccttctcagatgctgagaacgggcaacaactttaccttcagctacacctttgaggaagtgcctttccacagcagctacgcgcacagccagagcctggaccggctgatgaatcctctcatcgaccaatacctgtattacctgaacagaactcaaaatcagtccggaagtgcccaaaacaaggacttgctgtttagccgtgggtctccagctggcatgtctgttcagcccaaaaactggctacctggaccctgttatcggcagcagcgcgtttctaaaacaaaaacagacaacaacaacagcaattttacctggactggtgcttcaaaatataacctcaatgggcgtgaatccatcatcaaccctggcactgctatggcctcacacaaagacgacgaagacaagttctttcccatgagcggtgtcatgatttttggaaaggagagcgccggagcttcaaacactgcattggacaatgtcatgatcaccgacgaagaggaaatcaaagccactaaccccgtggccaccgaaagatttgggactgtggcagtcaatctccagagcagcagcacagaccctgcgaccggagatgtgcatgttatgggagccttacctggcatggtgtggcaagatagagacgtgtacctgcagggtcccatttgggccaaaattcctcacacagatggacactttcacccgtctcctcttatgggcggctttggactcaagaacccgcctcctcagatcctcatcaaaaacacgcctgttcctgcgaatcctccggcggagttttcagctacaaagtttgcttcattcatcacccaatactccacaggacaagtgagtgtggaaattgaatgggagctgcagaaagaaaacagcaagcgctggaatcccgaagtgcagtacacatccaattatgcaaaatctgccaacgttgattttactgtggacaacaatggactttatactgagcctcgccccattggcacccgttacctcacccgtcccctgtaa

SEQ ID NO: 371 - protein, 736 aa, Artificial Sequence
  Description of Artificial Sequence: Synthetic polypeptide
MAADGYLPDWLEDNLSEGIREWWALKPGAPKPKANQQKQDDGRGLVLPGYKYLGPFNGLDKGEPVNAADAAALEHDKAYDQQLQAGDNPYLRYNHADAEFQERLQEDTSFGGNLGRAVFQAKKWVLEPLGLVEEGAKTAPGKKRPVEQSPQEPDSSSGIGKTGQQPAKKRLNFGQTGDSESVPDPQPLGEPPATPAAVGPTTMASGGGAPMADNNEGADGVGNASGNWHCDSTWLGDRVITTSTRTWALPTYNNHLYKQISSASTGASNDNHYFGYSTPWGYFDFNRFHCHFSPRDWQRLINNNWGFRPKRLNFKLFNIQVKEVTTNDGVTTIANNLTSTVQVFSDSEYQLPYVLGSAHQGCLPPFPADVFMIPQYGYLTLNNGSQAVGRSSFYCLEYFPSQMLRTGNNFTFSYTFEEVPFHSSYAHSQSLDRLMNPLIDQYLYYLNRTQNQSGSAQNKDLLFSRGSPAGMSVQPKNWLPGPCYRQQRVSKTKTDNNNSNFTWTGASKYNLNGRESIINPGTAMASHKDDEDKFFPMSGVMIFGKESAGASNTALDNVMITDEEEIKATNPVATERFGTVAVNLQSSSTDPATGDVHVMGALPGMVWQDRDVYLQGPIWAKIPHTDGHFHPSPLMGGFGLKNPPPQILIKNTPVPANPPAEFSATKFASFITQYSTGQVSVEIEWELQKENSKRWNPEVQYTSNYAKSANVDFTVDNNGLYTEPRPIGTRYLTRPL

SEQ ID NO: 372 - DNA, 2214 bp, Artificial Sequence
  Description of Artificial Sequence: Synthetic polynucleotide
atggctgccgatggttatcttccagattggctcgaggacaaccttagtgaaggaattcgcgagtggtgggctttgaaacctggagcccctcaacccaaggcaaatcaacaacatcaagacaacgctcgaggtcttgtgcttccgggttacaaataccttggacccggcaacggactcgacaagggggagccggtcaacgcagcagacgcggcggccctcgagcacgacaaggcctacgaccagcagctgcaggcgggtgacaatccgtacctgcggtataaccacgccgacgccgagtttcaggagcgtctgcaagaagatacgtcttttgggggcaaccttggcagagcagtcttccaggccaaaaagaggatccttgagcctcttggtctggttgaggaagcagctaaaacggctcctggaaagaagaggcctgtagatcagtctcctcaggaaccggactcatcatctggtgttggcaaatcgggcaaacagcctgccagaaaaagactaaatttcggtcagactggcgactcagagtcagtcccagaccctcaacctctcggagaaccaccagcagcccccacaagtttgggatctaatacaatggcttcaggcggtggcgcaccaatggcagacaataacgagggtgccgatggggtgggtagttcctcgggaaattggcattgcgattcccaatggctgggggacagagtcatcaccaccagcacccgaacctgggccctgcccacctacaacaatcacctctacaagcaaatctccaacgggacatcgggaggagccaccaacgacaacacctacttcggctacagcaccccctgggggtattttgactttaacagattccactgccacttttcaccacgtgactggcagcgactcatcaacaacaactggggattccggcccaagagactcagcttcaagctcttcaacatccaggtcaaggaggtcacgcagaatgaaggcaccaagaccatcgccaataacctcaccagcaccatccaggtgtttacggactcggagtaccagctgccgtacgttctcggctcggcgcaccagggctgcctccctccgttcccggcggacgtcttcatggtgccacagtatggatacctgacgctcaacaatggcagccaagccgtgggacgttcatccttttactgcctggaatatttcccttctcagatgctgagaacgggcaacaactttaccttcagctacacctttgaggaagtgcctttccacagcagctacgcgcacagccagagcttggaccggctgatgaatcctctgattgaccagtacctgtactacttgtctcggactcaaacaacaggaggcacggcaaatacgcagactctgggcttcagccaaggtgggcctaatacaatggccaatcaggcaaagaactggctgccaggaccctgttaccgccaacaacgcgtctcaacgacaaccgggcaaaacaacaatagcaactttgcctggactgctgggaccaaataccatctgaatggaagaaattcattggctaatcctggcatcgctatggcaacacacaaagacgacgaggagcgtttttttcccagtaacgggatcctgatttttggcaaacaaaatgctgccagagacaatgcggattacagcgatgtcatgctcaccagcgaggaagaaatcaaaaccactaaccctgtggctacagaggaatacggtatcgtggcagataacttgcagcagcaaaacacggctcctcaaattggaactgtcaacagccagggggacttacccggtatggtctggcagaaccgggacgtgtacctgcagggtcccatctgggccaagattcctcacacggacggcaacttccacccgtctccgctgatgggcggctttggcctgaaacatcctccgcctcagatcctgatcaagaacacgcctgtacctgcggatcctccgaccaccttcaaccagtcaaagctgaactctttcatcacgcaatacagcaccggacaggtcagcgtggagatcgagtgggagctgcagaaggaaaacagcaagcgctggaacccggagatccagtacacttccaactattacaagtctaataatgttgaatttgctgttaatactgaaggtgtatatagtgaaccccgccccattggcaccagatacctgactcgtaatctgtaa

SEQ ID NO: 373 - protein, 737 aa, Artificial Sequence
  Description of Artificial Sequence: Synthetic polypeptide
MAADGYLPDWLEDNLSEGIREWWALKPGAPQPKANQQHQDNARGLVLPGYKYLGPGNGLDKGEPVNAADAAALEHDKAYDQQLQAGDNPYLRYNHADAEFQERLQEDTSFGGNLGRAVFQAKKRILEPLGLVEEAAKTAPGKKRPVDQSPQEPDSSSGVGKSGKQPARKRLNFGQTGDSESVPDPQPLGEPPAAPTSLGSNTMASGGGAPMADNNEGADGVGSSSGNWHCDSQWLGDRVITTSTRTWALPTYNNHLYKQISNGTSGGATNDNTYFGYSTPWGYFDFNRFHCHFSPRDWQRLINNNWGFRPKRLSFKLFNIQVKEVTQNEGTKTIANNLTSTIQVFTDSEYQLPYVLGSAHQGCLPPFPADVFMVPQYGYLTLNNGSQAVGRSSFYCLEYFPSQMLRTGNNFTFSYTFEEVPFHSSYAHSQSLDRLMNPLIDQYLYYLSRTQTTGGTANTQTLGFSQGGPNTMANQAKNWLPGPCYRQQRVSTTTGQNNNSNFAWTAGTKYHLNGRNSLANPGIAMATHKDDEERFFPSNGILIFGKQNAARDNADYSDVMLTSEEEIKTTNPVATEEYGIVADNLQQQNTAPQIGTVNSQGDLPGMVWQNRDVYLQGPIWAKIPHTDGNFHPSPLMGGFGLKHPPPQILIKNTPVPADPPTTFNQSKLNSFITQYSTGQVSVEIEWELQKENSKRWNPEIQYTSNYYKSNNVEFAVNTEGVYSEPRPIGTRYLTRNL

SEQ ID NO: 374 - DNA, 2205 bp, Artificial Sequence
  Description of Artificial Sequence: Synthetic polynucleotide
atggctgctgacggttatcttccagattggctcgaggacaacctttctgaaggcattcgtgagtggtgggctctgaaacctggagtccctcaacccaaagcgaaccaacaacaccaggacaactgtcggggtcttgtgcttccgggttacaaatacctcggacccggtaacggactcgacaaaggagagccggtcaacgaggcggacgcggcagccctcgaacacgacaaggcctacgaccagcagctcaaggccggagacaacccgtacctcaagtacaaccacgccgacgccgagttccaggagcggctcaaagaagatacgtcttttgggggcaacctcgggcgagcagtcttccagaccaaaaagaggcttcttgaacctcttggtctggttgaggaagcggctaagacggctcctggaaagaagaggcctgtagagcagtctcctcaggaaccggactcctccgcgggtattggcaaatcgggtgcacagcccgctaaaaagagactcaatttcggtcagactggcgacacagagtcagtcccagaccctcaaccaatcggagaacctcccgcagccccctcaggtgtgggatctcttacaatggcttcaggtggtggcgcaccagtggcagacaataacgaaggtgccgatggagtgggtagttcctcgggaaattggcattgcgattcccaatggctgggggacagagtcatcaccaccagcacccgaacctgggccctgcccacctacaacaaccacctctacaaacaaatttccagccaatcaggagcctcgaacgacaatcactactttggctacagcaccccttgggggtattttgacttcaacagattccactgccacttttcaccacgtgactggcagcgactcatcaacaacaactggggattccggcccaagagactcagcttcaagctcttcaacatccaggtcaaagaggttacggacaacaatggagtcaagaccatcgccaataaccttaccagcacggtccaggtcttcacggactcagactatcagctcccgtacgtgctcgggtcggctcacgagggctgcctcccgccgttcccagcggacgttttcatgattcctcagtacgggtatctgacgcttaatgatggaagccaggccgtgggtcgttcgtccttttactgcctggaatatttcccgtcgcaaatgctaagaacgggtaacaacttccagttcagctacgagtttgagaacgtacctttccatagcagctacgctcacagccaaagcctggaccgactaatgaatccactcatcgaccaatacttgtactatctctcaaagactattaacggttctggacagaatcaacaaacgctaaaattcagtgtggccggacccagcaacatggctgtccagggaagaaactacatacctggacccagctaccgacaacaacgtgtctcaaccactgtgactcaaaacaacaacagcgaatttgcttggcctggagcttcttcttgggctctcaatggacgtaatagcttgatgaatcctggacctgctatggccagccacaaagaaggagaggaccgtttctttcctttgtctggatctttaatttttggcaaacaaggaactggaagagacaacgtggatgcggacaaagtcatgataaccaacgaagaagaaattaaaactactaacccggtagcaacggagtcctatggacaagtggccacaaaccaccagagtgcccaagcacaggcgcagaccggctgggttcaaaaccaaggaatacttccgggtatggtttggcaggacagagatgtgtacctgcaaggacccatctgggccaagattcctcacacggacggcaacttccacccgtctccgctgatgggcggctttggcctgaaacatcctccgcctcagatcctgatcaagaacacgcctgttcctgcgaatcctccggcggagttttcagctacaaagtttgcttcattcatcacccagtactccacaggacaagtgagtgtggaaattgaatgggagctgcagaaagaaaacagcaagcgctggaatcccgaagtgcagtacacatccaattatgcaaaatctgccaacgttgattttactgtggacaacaatggactttatactgagcctcgccccattggcacccgttaccttaccaaacctctgtaa

SEQ ID NO: 375 - protein, 734 aa, Artificial Sequence
  Description of Artificial Sequence: Synthetic polypeptide
MAADGYLPDWLEDNLSEGIREWWALKPGVPQPKANQQHQDNCRGLVLPGYKYLGPGNGLDKGEPVNEADAAALEHDKAYDQQLKAGDNPYLKYNHADAEFQERLKEDTSFGGNLGRAVFQTKKRLLEPLGLVEEAAKTAPGKKRPVEQSPQEPDSSAGIGKSGAQPAKKRLNFGQTGDTESVPDPQPIGEPPAAPSGVGSLTMASGGGAPVADNNEGADGVGSSSGNWHCDSQWLGDRVITTSTRTWALPTYNNHLYKQISSQSGASNDNHYFGYSTPWGYFDFNRFHCHFSPRDWQRLINNNWGFRPKRLSFKLFNIQVKEVTDNNGVKTIANNLTSTVQVFTDSDYQLPYVLGSAHEGCLPPFPADVFMIPQYGYLTLNDGSQAVGRSSFYCLEYFPSQMLRTGNNFQFSYEFENVPFHSSYAHSQSLDRLMNPLIDQYLYYLSKTINGSGQNQQTLKFSVAGPSNMAVQGRNYIPGPSYRQQRVSTTVTQNNNSEFAWPGASSWALNGRNSLMNPGPAMASHKEGEDRFFPLSGSLIFGKQGTGRDNVDADKVMITNEEEIKTTNPVATESYGQVATNHQSAQAQAQTGWVQNQGILPGMVWQDRDVYLQGPIWAKIPHTDGNFHPSPLMGGFGLKHPPPQILIKNTPVPANPPAEFSATKFASFITQYSTGQVSVEIEWELQKENSKRWNPEVQYTSNYAKSANVDFTVDNNGLYTEPRPIGTRYLTKPL

SEQ ID NO: 376 - DNA, 2211 bp, Artificial Sequence
  Description of Artificial Sequence: Synthetic polynucleotide
atggctgccgatggttatcttccagattggctcgaggacaacctctctgagggcattcgcgagtggtgggacttgaaacctggagcccctaaacccaaggcaaatcaacaacatcaggacaacgctcgaggtcttgtgcttccgggttacaaataccttggacccggcaacggactcgacaagggggagccggtcaacgcagcagacgcggcggccctcgagcacgacaaggcctacgaccagcagctcaaggccggagacaacccgtacctcaagtacaaccacgccgacgccgagttccaggagcggctcaaagaagatacgtcttttgggggcaacctcgggcgagcagtcttccaggccaaaaagaggcttcttgaacctcttggtctggttgaggaagcggctaagacggctcctggaaagaagagaccggtagagccatcaccccagcgttctccagactcctctacgggcatcggcaagaaaggccaacagcccgctaaaaagagactcaattttggtcagactggcgactcagagtcagtccccgacccacaacctctcggagaacctccagcaacccccgctgctgtgggacctactacaatggcttcaggcggtggcgcaccaatggcagacaataacgagggtgccgatggagtgggtaattcctcaggaaattggcattgcgattcccaatggctgggcgacagagtcatcaccaccagcaccagaacctgggccctgcccacttacaacaaccatctctacaagcaaatctccagccaatcaggagcttcaaacgacaaccactactttggctacagcaccccttgggggtattttgactttaacagattccactgccacttttcaccacgtgactggcaaagactcatcaacaacaactggggattccgacccaagagactcaacttcaagctcttcaacatccaagtcaaggaggtcacgacgaatgatggcgtcacgaccatcgctaataaccttaccagcacggttcaagtcttctcggactcggagtaccagttgccgtacgtcctcggctctgcgcaccagggctgcctccctccgttcccggcggacgtgttcatgattccgcagtacggctacctaacgctcaacaatggcagccaagccgtgggacgttcatccttttactgcctggaatatttcccttctcagatgctgagaacgggcaacaactttaccttcagctacacttttgaggacgttcctttccacagcagctacgctcacagccagagtctggaccgtctcatgaatcctctcatcgaccagtacctgtattacttgagcagaacaaacactccaagtggaaccaccacgcagtcaaggcttcagttttctcaggccggagcgagtgacattcgggaccagtctaggaactggcttcctggaccctgttaccgccagcagcgcgtttctaaaacaaaaacagacaacaacaacagcaattttacctggactggtgcttcaaaatataaccttaatgggcgtgaatctataatcaaccctggcactgctatggcctcacacaaagacgacgaagacaagttctttcccatgagcggtgtcatgatttttggaaaagagagcgccggagcttcaaacactgcattggacaatgtcatgatcacagacgaagaggaaatcaaagccactaaccccgtggccaccgaaagatttgggactgtggcagtcaatctccagagcagcagcacagaccctgcgaccggagatgtgcatgttatgggagcattacctggcatggtgtggcaagatagagacgtgtacctgcagggtcccatttgggccaaaattcctcacacagatggacactttcacccgtctcctcttatgggcggctttggactcaagaacccgcctcctcagatcctcatcaaaaacacgcctgttcctgcgaatcctccggcggagttttcagctacaaagtttgcttcattcatcacccaatactccacaggacaagtgagtgtggaaattgaatgggagctgcagaaagaaaacagcaagcgctggaatcccgaagtgcagtacacatccaattatgcaaaatctgccaacgttgattttactgtggacaacaatggactttatactgagcctcgccccattggcacccgttaccttacccgtcccctgtaa

SEQ ID NO: 377 - protein, 736 aa, Artificial Sequence
  Description of Artificial Sequence: Synthetic polypeptide
MAADGYLPDWLEDNLSEGIREWWDLKPGAPKPKANQQHQDNARGLVLPGYKYLGPGNGLDKGEPVNAADAAALEHDKAYDQQLKAGDNPYLKYNHADAEFQERLKEDTSFGGNLGRAVFQAKKRLLEPLGLVEEAAKTAPGKKRPVEPSPQRSPDSSTGIGKKGQQPAKKRLNFGQTGDSESVPDPQPLGEPPATPAAVGPTTMASGGGAPMADNNEGADGVGNSSGNWHCDSQWLGDRVITTSTRTWALPTYNNHLYKQISSQSGASNDNHYFGYSTPWGYFDFNRFHCHFSPRDWQRLINNNWGFRPKRLNFKLFNIQVKEVTTNDGVTTIANNLTSTVQVFSDSEYQLPYVLGSAHQGCLPPFPADVFMIPQYGYLTLNNGSQAVGRSSFYCLEYFPSQMLRTGNNFTFSYTFEDVPFHSSYAHSQSLDRLMNPLIDQYLYYLSRTNTPSGTTTQSRLQFSQAGASDIRDQSRNWLPGPCYRQQRVSKTKTDNNNSNFTWTGASKYNLNGRESIINPGTAMASHKDDEDKFFPMSGVMIFGKESAGASNTALDNVMITDEEEIKATNPVATERFGTVAVNLQSSSTDPATGDVHVMGALPGMVWQDRDVYLQGPIWAKIPHTDGHFHPSPLMGGFGLKNPPPQILIKNTPVPANPPAEFSATKFASFITQYSTGQVSVEIEWELQKENSKRWNPEVQYTSNYAKSANVDFTVDNNGLYTEPRPIGTRYLTRPL

SEQ ID NO: 378 - DNA, 2214 bp, Artificial Sequence; identical to SEQ ID NO: 350
  Description of Artificial Sequence: Synthetic polynucleotide

SEQ ID NO: 379 - protein, 737 aa, Artificial Sequence; identical to SEQ ID NO: 351
  Description of Artificial Sequence: Synthetic polypeptide

SEQ ID NO: 380 - DNA, 2205 bp, Artificial Sequence
  Description of Artificial Sequence: Synthetic polynucleotide
atggctgctgacggttatcttccagattggctcgaggacaacctttctgaaggcattcgtgagtggtgggctctgaaacctggagtccctcaacccaaagcgaaccaacaacaccaggacaaccgtcggggtcttgtgcttccgggttacaaatacctcggacccggtaacggactcgacaaaggagagccggtcaacgaggcggacgcggcagccctcgaacacgacaaggcctacgaccagcagctcaaggccggagacaacccgtacctcaagtacaaccacgccgacgccgagttccaggagcggctcaaagaagatacgtcttttgggggcaacctcgggcgagcagtcttccaggccaaaaagaggcttcttgaacctcttggtctggttgaggaagcggctaagacggctcctggaaagaagaggcctgtagagcagtctcctcaggaaccggactcctccgcgggtattggcaaatcgggtgcacagcccgctaaaaagagactcaatttcggtcagactggcgacacagagtcagtcccagaccctcaaccaatcggagaacctcccgcagccccctcaggtgtgggatctcttacaatggcttcaggtggtggcgcaccagtggcagacaataacgaaggtgccgatggagtgggtagttcctcgggaaattggcattgcgattcccaatggctgggggacagagtcatcaccaccagcacccgaacctgggccctgcccacctacaacaaccacctctacaaacaaatttccagccaatcaggagcctcgaacgacaatcactactttggctacagcaccccttgggggtattttgacttcaacagattccactgccacttttcaccacgtgactggcagcgactcatcaacaacaactggggattccggcccaagagactcagcttcaagctcttcaacatccaggtcaaagaggttacggacaacaatggagtcaagaccatcgccaataaccttaccagcacggtccaggtcttcacggactcagactatcagctcccgtacgtgctcgggtcggctcacgagggctgcctcccgccgttcccagcggacgttttcatgattcctcagtacgggtatctgacgcttaatgatggaagccaggccgtgggtcgttcgtccttttactgcctggaatatttcccgtcgcaaatgctaagaacgggtaacaacttccagttcagctacgagtttgagaacgtacctttccatagcagctacgctcacagccaaagcctggaccgactaatgaatccactcatcgaccaatacttgtactatctctcaaagactattaacggttctggacagaatcaacaaacgctaaaattcagtgtggccggacccagcaacatggctgtccagggaagaaactacatacctggacccagctaccgacaacaacgtgtctcaaccactgtgactcaaaacaacaacagcgaatttgcttggcctggagcttcttcttgggctctcaatggacgtaatagcttgatgaatcctggacctgctatggccagccacaaagaaggagaggaccgtttctttcctttgtctggatctttaatttttggcaaacaaggaactggaagagacaacgtggatgcggacaaagtcatgataaccaacgaagaagaaattaaaactactaacccggtagcaacggagtcctatggacaagtggccacaaaccaccagagtgcccaagcacaggcgcagaccggctgggttcaaaaccaaggaatacttccgggtatggtttggcaggacagagatgtgtacctgcaaggacccatttgggccaaaattcctcacacggacggcaactttcacccttctccgctgatgggagggtttggaatgaaacacccgcctcctcagatcctcatcaaaaacacacctgtacctgcggatcctccaacggccttcaacaaggacaagctgaactctttcatcacccagtattctactggccaagtcagcgtggagatcgagtgggagctgcagaaggaaaacagcaagcgctggaaccccgagatccagtacacctccaactactacaaatctacaagtgtggactttgctgttaatacagaaggcgtgtactctgaaccccgccccattggcacccgttacctcacccgtaatctgtaa

SEQ ID NO: 381 - protein, 734 aa, Artificial Sequence
  Description of Artificial Sequence: Synthetic polypeptide
MAADGYLPDWLEDNLSEGIREWWALKPGVPQPKANQQHQDNRRGLVLPGYKYLGPGNGLDKGEPVNEADAAALEHDKAYDQQLKAGDNPYLKYNHADAEFQERLKEDTSFGGNLGRAVFQAKKRLLEPLGLVEEAAKTAPGKKRPVEQSPQEPDSSAGIGKSGAQPAKKRLNFGQTGDTESVPDPQPIGEPPAAPSGVGSLTMASGGGAPVADNNEGADGVGSSSGNWHCDSQWLGDRVITTSTRTWALPTYNNHLYKQISSQSGASNDNHYFGYSTPWGYFDFNRFHCHFSPRDWQRLINNNWGFRPKRLSFKLFNIQVKEVTDNNGVKTIANNLTSTVQVFTDSDYQLPYVLGSAHEGCLPPFPADVFMIPQYGYLTLNDGSQAVGRSSFYCLEYFPSQMLRTGNNFQFSYEFENVPFHSSYAHSQSLDRLMNPLIDQYLYYLSKTINGSGQNQQTLKFSVAGPSNMAVQGRNYIPGPSYRQQRVSTTVTQNNNSEFAWPGASSWALNGRNSLMNPGPAMASHKEGEDRFFPLSGSLIFGKQGTGRDNVDADKVMITNEEEIKTTNPVATESYGQVATNHQSAQAQAQTGWVQNQGILPGMVWQDRDVYLQGPIWAKIPHTDGNFHPSPLMGGFGMKHPPPQILIKNTPVPADPPTAFNKDKLNSFITQYSTGQVSVEIEWELQKENSKRWNPEIQYTSNYYKSTSVDFAVNTEGVYSEPRPIGTRYLTRNL

SEQ ID NO: 382 - DNA, 2217 bp, Artificial Sequence
  Description of Artificial Sequence: Synthetic polynucleotide
atggctgccgatggttatcttccagattggctcgaggacaacctctctgagggcattcgcgagtggtgggcgctgaaacctggagccccgaagcccaaagccaaccagcaaaagcaggacgacggccggggtctggtgcttcctggctacaagtacctcggacccttcaacggactcgacaagggggagcccgtcaacgcggcggacgcagcggccctcgagcacgacaaggcctacgaccagcagctgcaggcgggtgacaatccgtacctgcggtataaccacgccgacgccgagtttcaggagcgtctgcaagaagatacgtcttttgggggcaacctcgggcgagcagtcttccaggccaagaagcgggttctcgaacctctcggtctggttgaggaaggcgctaagacggctcctggaaagaagagaccggtagagccatcaccccagcgttctccagactcctctacgggcatcggcaagaaaggccaacagcccgccagaaaaagactcaattttggtcagactggcgactcagagtcagttccagaccctcaacctctcggagaacctccagcagcgccctctggtgtgggacctaatacaatggctgcaggcggtggcgcaccaatggcagacaataacgaaggcgccgacggagtgggtagttcctcgggaaattggcattgcgattccacatggctgggcgacagagtcatcaccaccagcacccgaacctgggccctgcccacctacaacaaccacctctacaagcaaatctccaacgggacatcgggaggagccaccaacgacaacacctacttcggctacagcaccccctgggggtattttgactttaacagattccactgccacttttcaccacgtgactggcagcgactcatcaacaacaactggggattccggcccaagagactcagcttcaagctcttcaacatccaggtcaaggaggtcacgcagaatgaaggcaccaagaccatcgccaataacctcaccagcaccatccaggtgtttacggactcggagtaccagctgccgtacgttctcggctctgcccaccagggctgcctgcctccgttcccggcggacgtgttcatgattccccagtacggctacctaacactcaacaacggtagtcaggccgtgggacgctcctccttctactgcctggaatactttccttcgcagatgctgagaaccggcaacaacttccagtttacttacaccttcgaggacgtgcctttccacagcagctacgcccacagccagagcttggaccggctgatgaatcctctgattgaccagtacctgtactacttgtctcggactcaaacaacaggaggcacggcaaatacgcagactctgggcttcagccaaggtgggcctaatacaatggccaatcaggcaaagaactggctgccaggaccctgttaccgccaacaacgcgtctcaacgacaaccgggcaaaacaacaatagcaactttgcctggactgctgggaccaaataccatctgaatggaagaaattcattggctaatcctggcatcgctatggcaacacacaaagacgacgaggagcgtttttttcccagtaacgggatcctgatttttggcaaacaaaatgctgccagagacaatgcggattacagcgatgtcatgctcaccagcgaggaagaaatcaaaaccactaaccctgtggctacagaggaatacggtatcgtggcagataacttgcagcagcaaaacacggctcctcaaattggaactgtcaacagccagggggccttacccggtatggtctggcagaaccgggacgtgtacctgcagggtcccatctgggccaagattcctcacacggacggcaacttccacccctctcccctcatgggtggattcggacttaaacatcctccgcctcagatcctgatcaagaacacgcctgtacctgcggatcctccgaccaccttcaaccagtcaaagctgaactctttcatcacgcaatacagcaccggacaggtcagcgtggaaattgaatgggagctgcagaaggaaaacagcaagcgctggaaccccgagatccagtacacctccaactactacaaatctacaagtgtggactttgctgttaatacagaaggcgtgtactctgaaccccgccccattggcacccgttacctcacccgtaatctgtaa

SEQ ID NO: 383 - protein, 738 aa, Artificial Sequence; identical to SEQ ID NO: 129
  Description of Artificial Sequence: Synthetic polypeptide

SEQ ID NO: 384 - DNA, 2211 bp, Artificial Sequence
  Description of Artificial Sequence: Synthetic polynucleotide
atggctgctgacggttatcttccagattggctcgaggacaacctttctgaaggcattcgagagtggtgggcgctgcaacctggagcccctaaacccaaggcaaatcaacaacatcaggacaacgctcggggtcttgtgcttccgggttacaaatacctcggacccggcaacggactcgacaagggggaacccgtcaacgcagcggacgcggcagccctcgagcacgacaaggcctacgaccagcagctcaaggccggtgacaacccctacctcaagtacaaccacgccgacgccgagttccaggagcggctcaaagaagatacgtcttttgggggcaacctcgggcgagcagtcttccaggccaaaaagaggcttcttgaacctcttggtctggttgaggaagcggctaagacggctcctggaaagaagaggcctgtagatcagtctcctcaggaaccggactcatcatctggtgttggcaaatcgggcaaacagcctgccagaaaaagactaaatttcggtcagactggcgactcagagtcagtcccagaccctcaacctctcggagaaccaccagcagcccccacaagtttgggatctaatacaatggcttcaggcggtggcgcaccaatggcagacaataacgagggtgccgatggagtgggtaattcctcaggaaattggcattgcgattcccaatggctgggcgacagagtcatcaccaccagcaccagaacctgggccctgcccacttacaacaaccatctctacaagcaaatctccagccaatcaggagcttcaaacgacaaccactactttggctacagcaccccttgggggtattttgactttaacagattccactgccacttctcaccacgtgactggcagcgactcattaacaacaactggggattccggcccaagaaactcagcttcaagctcttcaacatccaagttaaagaggtcacgcagaacgatggcacgacgactattgccaataaccttaccagcacggttcaggtgtttacggactcggagtatcagctcccgtacgtgctcgggtcggcgcaccaaggctgtctcccgccgtttccagcggacgtcttcatggtccctcagtatggatacctcaccctgaacaacggaagtcaagcggtgggacgctcatccttttactgcctggagtacttcccttcgcagatgctaaggactggaaataacttccaattcagctataccttcgaggatgtaccttttcacagcagctacgctcacagccagagtttggatcgcttgatgaatcctcttattgatcagtatctgtactacctgaacagaacgcaaggaacaacctctggaacaaccaaccaatcacggctgctttttagccaggctgggcctcagtctatgtctttgcaggccagaaattggctacctgggccctgctaccggcaacagagactttcaaagactgctaacgacaacaacaacagtaactttccttggacagcggccagcaaatatcatctcaatggccgcgactcgctggtgaatccaggaccagctatggccagtcacaaggacgatgaagaaaaatttttccctatgcacggcaatctaatatttggcaaagaagggacaacggcaagtaacgcagaattagataatgtaatgattacggatgaagaagagattcgtaccaccaatcctgtggcaacagagcagtatggaactgtggcaaataacttgcagagctcaaatacagctcccacgactagaactgtcaatgatcagggggccttacctggcatggtgtggcaagatcgtgacgtgtaccttcaaggacctatctgggcaaagattcctcacacggatggacactttcatccttctcctctgatgggaggctttggactgaaacatccgcctcctcaaatcatgatcaaaaatactccggtaccggcaaatcctccgacgactttcagcccggccaagtttgcttcatttatcactcagtactccactggacaggtcagcgtggaaattgagtgggagctacagaaagaaaacagcaaacgttggaatccagagattcagtacacttccaactacaacaagtctgttaatgtggactttactgtagacactaatggtgtttatagtgaacctcgccccattggcacccgttaccttacccgtcccctgtaa

SEQ ID NO: 385 - protein, 736 aa, Artificial Sequence; identical to SEQ ID NO: 355
  Description of Artificial Sequence: Synthetic polypeptide

SEQ ID NO: 386 - DNA, 2211 bp, Artificial Sequence; identical to SEQ ID NO: 354
  Description of Artificial Sequence: Synthetic polynucleotide

SEQ ID NO: 387 - protein, 736 aa, Artificial Sequence; identical to SEQ ID NO: 355
  Description of Artificial Sequence: Synthetic polypeptide

SEQ ID NO: 388 - DNA, 2211 bp, Artificial Sequence
  Description of Artificial Sequence: Synthetic polynucleotide
atggctgctgacggttatcttccagattggctcgaggacaacctttctgaaggcattcgtgagtggtgggctctgaaacctggagtccctcaacccaaagcgaaccaacaacaccaggacaaccgtcggggtcttgtgcttccgggttacaaatacctcggacccggtaacggactcgacaaaggagagcccgtcaacgcggcggatgcagcggccctcgagcacgacaaggcctacgaccagcagctcaaagcgggtgacaatccgtacctgcggtataaccacgccgacgccgagtttcaggagcgtctgcaagaagatacgtcttttgggggcaacctcgggcgagcagtcttccaggccaagaagagggttctcgaaccttttggtctggttgaggaaggtgctaagacggctcctggaaagaaacgtccggtagagcagtcgccacaagagccagactcctcctcgggcatcggcaagacaggccagcagcccgctaaaaagagactcaattttggtcagactggcgactcagagtcagtccccgacccacaacctctcggagaacctccagcaacccccgctgctgtgggacctactacaatggcttcaggcggtggcgcaccaatggcagacaataacgaaggcgccgacggagtgggtaatgcctcaggaaattggcattgcgattccacatggctgggcgacagagtcatcaccaccagcacccgcacctgggccttgcccacctacaataaccacctctacaagcaaatctccagtgcttcaacgggggccagcaacgacaaccactacttcggctacagcaccccctgggggtattttgatttcaacagattccactgccatttctcaccacgtgactggcagcgactcatcaacaacaattggggattccggcccaagagactcaacttcaagctcttcaacatccaagtcaaggaggtcacgacgaatgatggcgtcacgaccatcgctaataaccttaccagcacggttcaagtcttctcggactcggagtaccagcttccgtacgtcctcggctctgcgcaccagggctgcctccctccgttcccggcggacgtgttcatgattccgcaatacggctacctgacgctcaacaatggcagccaagccgtgggacgttcatccttttactgcctggaatatttcccttctcagatgctgagaacgggcaacaactttaccttcagctacacctttgaggaagtgcctttccacagcagctacgcgcacagccagagcctggaccggctgatgaatcctctcatcgaccaatacctgtattacctgaacagaactcaaaatcagtccggaagtgcccaaaacaaggacttgctgtttagccgtgggtctccagctggcatgtctgttcagcccaaaaactggctacctggaccctgttatcggcagcagcgcgtttctaaaacaaaaacagacaacaacaacagcaattttacctggactggtgcttcaaaatataacctcaatgggcgtgaatccatcatcaaccctggcactgctatggcctcacacaaagacgacgaagacaagttctttcccatgagcggtgtcatgatttttggaaaagagagcgccggagcttcaaacactgcattggacaatgtcatgattacagacgaagaggaaattaaagccactaaccctgtggccaccgaaagatttgggaccgtggcagtcaatttccagagcagcagcacagaccctgcgaccggagatgtgcatgttatgggagccttacctggaatggtgtggcaagacagagacgtatacctgcagggtcctatttgggccaaaattcctcacacggatggacactttcacccgtctcctctcatgggcggctttggacttaagcacccgcctcctcagatcctcatcaaaaacacgcctgttcctgcgaatcctccggcagagttttcggctacaaagtttgcttcattcatcacccagtattccacaggacaagtgagcgtggagattgaatgggagctgcagaaagaaaacagcaaacgctggaatcccgaagtgcagtatacatctaactatgcaaaatctgccaacgttgatttcactgtggacaacaatggactttatactgagcctcgccccattggcacccgttacctcacccgtcccctgtaa

SEQ ID NO: 389 - protein, 736 aa, Artificial Sequence
  Description of Artificial Sequence: Synthetic polypeptide
MAADGYLPDWLEDNLSEGIREWWALKPGVPQPKANQQHQDNRRGLVLPGYKYLGPGNGLDKGEPVNAADAAALEHDKAYDQQLKAGDNPYLRYNHADAEFQERLQEDTSFGGNLGRAVFQAKKRVLEPFGLVEEGAKTAPGKKRPVEQSPQEPDSSSGIGKTGQQPAKKRLNFGQTGDSESVPDPQPLGEPPATPAAVGPTTMASGGGAPMADNNEGADGVGNASGNWHCDSTWLGDRVITTSTRTWALPTYNNHLYKQISSASTGASNDNHYFGYSTPWGYFDFNRFHCHFSPRDWQRLINNNWGFRPKRLNFKLFNIQVKEVTTNDGVTTIANNLTSTVQVFSDSEYQLPYVLGSAHQGCLPPFPADVFMIPQYGYLTLNNGSQAVGRSSFYCLEYFPSQMLRTGNNFTFSYTFEEVPFHSSYAHSQSLDRLMNPLIDQYLYYLNRTQNQSGSAQNKDLLFSRGSPAGMSVQPKNWLPGPCYRQQRVSKTKTDNNNSNFTWTGASKYNLNGRESIINPGTAMASHKDDEDKFFPMSGVMIFGKESAGASNTALDNVMITDEEEIKATNPVATERFGTVAVNFQSSSTDPATGDVHVMGALPGMVWQDRDVYLQGPIWAKIPHTDGHFHPSPLMGGFGLKHPPPQILIKNTPVPANPPAEFSATKFASFITQYSTGQVSVEIEWELQKENSKRWNPEVQYTSNYAKSANVDFTVDNNGLYTEPRPIGTRYLTRPL

SEQ ID NO: 390 - DNA, 2217 bp, Artificial Sequence
  Description of Artificial Sequence: Synthetic polynucleotide
atggctgccgatggttatcttccagattggctcgaggacaacctctctgagggcattcgcgagtggtgggacttgaaacctggagccccgaaacccaaagccaaccagcaaaagcaggacgacggccggggtctggtgcttcctggctacaagtacctcggacccttcaacggactcgacaagggggagcccgtcaacgcggcggatgcaacggccctcgagcacgacaaggcctacgaccagcagctgcaggcgggtgacaatccgtacctgcggtataaccacgccgacgccgagtttcaggagcgtctgcaagaagatacgtcttttgggggcaacctcgggcgagcagtcttccaggccaagaagcgggttctcgaacctctcggtctggttgaggaaggcgctaagacggctcctggaaagaagagaccggtagagccatcaccccagcgttctccagactcctctacgggcatcggcaagaaaggccaacagcccgccagaaaaagactcaattttggtcagactggcgactcagagtcagttccagaccctcaacctctcggagaaccaccagcagcccccacaagtttgggatctaatacaatggcttcaggcggtggcgcaccaatggcagacaataacgagggtgccgatggagtgggtaattcctcaggaaattggcattgcgattcccaatggctgggcgacagagtcatcaccaccagcacccgcacctgggccttgcccacctacaataaccacctctacaagcaaatctccagtgcttcaacgggggccagcaacgacaaccactacttcggctacagcaccccctgggggtattttgactttaaccgcttccactgccacttctcgccaagagactggcaaagactcatcaacaacaattggggattccggcccaagagactcaacttcaaactcttcaacatccaagtcaaggaggtcacgacgaatgatggcgtcacgaccatcgccaataacctcaccagcaccatccaggtgtttacggactcggagtaccagctgccgtacgttctcggctctgcccaccagggctgcctgcctccgttcccggcggacgtgttcatgattccccagtatggatacctcaccctgaacaacggaagtcaagcggtgggacgctcatccttttactgcctggagtacttcccttcgcagatgctaaggactggaaataacttccaattcagctataccttcgaggatgtaccttttcacagcagctacgctcacagccagagtttggatcgcttgatgaatcctcttattgatcagtatctgtactacctgaacagaacgcaaggaacaacctctggaacaaccaaccaatcacggctgctttttagccaggctgggcctcagtctatgtctttgcaggccagaaattggctacctgggccctgctaccggcaacagagactttcaaagactgctaacgacaacaacaacagtaactttccttggacagcagccagcaaatatcatctcaatggccgcgactcgctggtgaatccaggaccagctatggccagtcacaaggacgatgaagaaaaatttttccctatgcacggcaatctaatatttggcaaagaagggacaacggcaagtaacgcagaattagataatgtaatgattacggatgaagaagagattcgtaccaccaatcctgtggcaacagagcagtatggaactgtggcaaataacttgcagagctcaaatacagctcccacgactagaactgtcaatgatcagggggccttacctggcatggtgtggcaagatcgtgacgtgtaccttcaggggcccatctgggcaaagattccacacacggacggacattttcacccctctcccctcatgggtggattcggacttaaacaccctcctccgcagattctcatcaagaacaccccggtacctgcgaatccttcgaccaccttcagtgcggcaaagtttgcttccttcatcacacagtactccacgggacaggtcagcgtggagatcgagtgggagctgcagaaggaaaacagcaagcgctggaacccggagatccagtacacttccaactattacaagtctaataatgttgaatttgctgttaatactgaaggtgtatatagtgaaccccgccccattggcaccagatacctgactcgtaatctgtaa

SEQ ID NO: 391 - protein, 738 aa, Artificial Sequence
  Description of Artificial Sequence: Synthetic polypeptide
MAADGYLPDWLEDNLSEGIREWWDLKPGAPKPKANQQKQDDGRGLVLPGYKYLGPFNGLDKGEPVNAADATALEHDKAYDQQLQAGDNPYLRYNHADAEFQERLQEDTSFGGNLGRAVFQAKKRVLEPLGLVEEGAKTAPGKKRPVEPSPQRSPDSSTGIGKKGQQPARKRLNFGQTGDSESVPDPQPLGEPPAAPTSLGSNTMASGGGAPMADNNEGADGVGNSSGNWHCDSQWLGDRVITTSTRTWALPTYNNHLYKQISSASTGASNDNHYFGYSTPWGYFDFNRFHCHFSPRDWQRLINNNWGFRPKRLNFKLFNIQVKEVTTNDGVTTIANNLTSTIQVFTDSEYQLPYVLGSAHQGCLPPFPADVFMIPQYGYLTLNNGSQAVGRSSFYCLEYFPSQMLRTGNNFQFSYTFEDVPFHSSYAHSQSLDRLMNPLIDQYLYYLNRTQGTTSGTTNQSRLLFSQAGPQSMSLQARNWLPGPCYRQQRLSKTANDNNNSNFPWTAASKYHLNGRDSLVNPGPAMASHKDDEEKFFPMHGNLIFGKEGTTASNAELDNVMITDEEEIRTTNPVATEQYGTVANNLQSSNTAPTTRTVNDQGALPGMVWQDRDVYLQGPIWAKIPHTDGHFHPSPLMGGFGLKHPPPQILIKNTPVPANPSTTFSAAKFASFITQYSTGQVSVEIEWELQKENSKRWNPEIQYTSNYYKSNNVEFAVNTEGVYSEPRPIGTRYLTRNL

SEQ ID NO: 392 - DNA, 2208 bp, Artificial Sequence
  Description of Artificial Sequence: Synthetic polynucleotide
atggctgccgatggttatcttccagattggctcgaggacaaccttagtgaaggaattcgcgagtggtgggacttgaaacctggagccccgaagcccaaagccaaccagcaaaagcaggacgacggccggggtctggtgcttcctggctacaagtacctcggacccttcaacggactcgacaagggggagcccgtcaacgcggcggacgcagcggccctcgagcacgacaaggcctacgaccagcagctcaaagcgggtgacaatccgtacctgcggtataaccacgccgacgccgagtttcaggagcgtctgcaagaagatacgtcttttgggggcaacctcgggcgagcagtcttccaggccaagaagcgggttctcgaacctctcggtctggttgaggaaggtgctaagacggctcctggaaagaaacgtccggtagagcagtcgccacaagagccagactcctcctcgggcattggcaagacaggccagcagcccgctaaaaagagactcaattttggtcagactggcgactcagagtcagtccccgacccacaacctctcggagaacctccagcaacccccgctgctgtgggacctactacaatggcttcaggcggtggcgcaccaatggcagacaataacgaaggcgccgacggagtgggtaatgcctcaggaaattggcattgcgattccacatggctgggcgacagagtcatcaccaccagcacccgaacctgggccctgcccacctacaacaaccacctctacaaacaaatttccagccaatcaggagcctcgaacgacaatcactactttggctacagcaccccttgggggtattttgatttcaacagattccactgccacttttcaccacgtgactggcagcgactcatcaacaacaattggggattccggcccaagagactcagcttcaagctcttcaacatccaggtcaaggaggtcacgcagaatgaaggcaccaagaccatcgccaataaccttaccagcacggttcaagtgtttacggactcggagtatcagctcccgtacgtgctcggctcggcgcatcaaggatgcctcccgccgttcccagcagacgtcttcatggtgccacagtatggatacctcaccctgaacaacgggagtcaggcagtaggacgctcttcattttactgcctggagtactttccttctcagatgctgcgtaccggaaacaactttaccttcagctacacttttgaggacgttcctttccacagcagctacgctcacagccagagtctggaccgtctcatgaatcctctgattgaccagtacctgtattacttgagcagaacaaacactccaagtggaaccaccacgcagtcaaggcttcagttttctcaggccggagcgagtgacattcgggaccagtctaggaactggcttcctggaccctgttaccgccagcagcgagtatcaaagacatctgcggataacaacaacagtgaatactcgtggactggagctaccaagtaccacctcaatggcagagactctctggtgaatccgggcccggccatggcaagccacaaggactatgaagaaaagttttttcctcagagcggggttctcatctttgggaagcaaggctcagagaaaacaaatgtggacattgaaaaggtcatgattacagacgaagaggaaatcaggacaaccaatcccgtggctacggagcagtatggttctgtatctaccaacctccagagaggcaacagacaagcagctaccgcagatgtcaacacacaaggcgttcttccaggcatggtctggcaggacagagatgtgtaccttcaggggcccatctgggcaaagattccacacacggacggacattttcacccgtctccgctgatgggcggctttggcctgaaacatcctccgcctcagatcctgatcaagaacacgcctgtacctgcggatcctccgaccaccttcaaccagtcaaagctgaactctttcatcactcagtattctactggccaagtcagcgtggagatcgagtgggagctgcagaaggaaaacagcaagcgctggaaccccgagatccagtacacctccaactactacaaatctacaagtgtggactttgctgttaatacagaaggcgtgtactctgaaccccgccccattggcacccgttacctcacccgtaatctgtaa

SEQ ID NO: 393 - protein, 735 aa, Artificial Sequence
  Description of Artificial Sequence: Synthetic polypeptide
MAADGYLPDWLEDNLSEGIREWWDLKPGAPKPKANQQKQDDGRGLVLPGYKYLGPFNGLDKGEPVNAADAAALEHDKAYDQQLKAGDNPYLRYNHADAEFQERLQEDTSFGGNLGRAVFQAKKRVLEPLGLVEEGAKTAPGKKRPVEQSPQEPDSSSGIGKTGQQPAKKRLNFGQTGDSESVPDPQPLGEPPATPAAVGPTTMASGGGAPMADNNEGADGVGNASGNWHCDSTWLGDRVITTSTRTWALPTYNNHLYKQISSQSGASNDNHYFGYSTPWGYFDFNRFHCHFSPRDWQRLINNNWGFRPKRLSFKLFNIQVKEVTQNEGTKTIANNLTSTVQVFTDSEYQLPYVLGSAHQGCLPPFPADVFMVPQYGYLTLNNGSQAVGRSSFYCLEYFPSQMLRTGNNFTFSYTFEDVPFHSSYAHSQSLDRLMNPLIDQYLYYLSRTNTPSGTTTQSRLQFSQAGASDIRDQSRNWLPGPCYRQQRVSKTSADNNNSEYSWTGATKYHLNGRDSLVNPGPAMASHKDYEEKFFPQSGVLIFGKQGSEKTNVDIEKVMITDEEEIRTTNPVATEQYGSVSTNLQRGNRQAATADVNTQGVLPGMVWQDRDVYLQGPIWAKIPHTDGHFHPSPLMGGFGLKHPPPQILIKNTPVPADPPTTFNQSKLNSFITQYSTGQVSVEIEWELQKENSKRWNPEIQYTSNYYKSTSVDFAVNTEGVYSEPRPIGTRYLTRNL

SEQ ID NO: 394 - DNA, 2214 bp, Artificial Sequence
  Description of Artificial Sequence: Synthetic polynucleotide
atggctgccgatggttatcttccagattggctcgaggacaacctctctgagggcattcgcgagtggtgggacttgaaacctggagccccgaaacccaaagccaaccagcaaaagcaggacgacggccggggtctggtgcttcctggctacaagtacctcggacccttcaacggactcgacaagggggagcccgtcaacgcggcggatgcagcggccctcgagcacgacaaggcctacgaccagcagctcaaagcgggtgacaatccgtacctgcggtataaccacgccgacgccgagtttcaggagcgtctgcaagaagatacgtcttttgggggcaacctcgggcgagcagtcttccaggccaagaagagggttctcgaaccttttggtctggttgaggaaggtgctaagacggctcctggaaagaaacgtccggtagagcagtcgccacaagagccagactcctcctcgggcattggcaagacaggccagcagcctgcaagaaaaagattgaattttggtcagactggagacgcagactcagtacctgacccccagcctctcggacagccaccagcagccccctctggtctgggaactaatacgatggctacaggcagtggcgcaccaatggcagacaataacgagggcgccgacggagtgggtaattcctcgggaaattggcattgcgattcccaatggctgggggacagagtcatcaccaccagcacccgaacctgggccctgcccacctacaacaatcacctctacaagcaaatctccaacagcacatctggaggatcttcaaatgacaacgcctacttcggctacagcaccccctgggggtattttgatttcaacagattccactgccatttctcaccacgtgactggcagcgactcatcaacaacaattggggattccggcccaagagactcaacttcaagctcttcaacatccaggtcaaggaggtcacgcagaatgaaggcaccaagaccatcgccaataacctcaccagcaccatccaggtgtttacggactcggagtaccagctgccgtacgttctcggctctgcccaccagggctgcctgcctccgttcccggcggacgtgttcatgattccccagtacggctacctaacactcaacaacggtagtcaggccgtgggacgctcctccttctactgcctggaatactttccttcgcagatgctgagaaccggcaacaacttccagtttacttacaccttcgaggacgtgcctttccacagcagctacgcccacagccagagcttggaccggctgatgaatcctctgattgaccagtacctgtactacttgtctcggactcaaacaacaggaggcacgacaaatacgcagactctgggcttcagccaaggtgggcctaatacaatggccaatcaggcaaagaactggctgccaggaccctgttaccgccagcagcgagtatcaaagacatttgcggataacaacaacagtgaatactcgtggactggagctaccaagtaccacctcaatggcagagactctctggtgaatccgggcccggccatggcaagccacaaggacgatgaagaaaagttttttcctcagagcggggttctcatctttgggaagcaaggctcagagaaaacaaatgtggacattgaaaaggtcatgattacagacgaagaggaaatcaggacaaccaatcccgtggctacggagcagtatggttctgtatctaccaacctccagagaggcaacagacaagcagctaccgcagatgtcaacacacaaggcgttcttccaggcatggtctggcaggacagagatgtgtaccttcaggggcccatctgggcaaagattccacacacggacggacattttcacccctctcccctcatgggtggattcggacttaaacaccctccgcctcagatcctgatcaagaacacgcctgtacccgcggatcctccgaccaccttcaaccagtcaaagctgaactctttcatcacccagtattctactggccaagtcagcgtggagatcgagtgggagctgcagaaggaaaacagcaagcgctggaaccccgagatccagtacacctccaactactacaaatctacaagtgtggactttgctgttaatacagaaggcgtgtactctgaaccccgccccattggcacccgttacctcacccgtaatctgtaa

SEQ ID NO: 395 - protein, 737 aa, Artificial Sequence
  Description of Artificial Sequence: Synthetic polypeptide
MAADGYLPDWLEDNLSEGIREWWDLKPGAPKPKANQQKQDDGRGLVLPGYKYLGPFNGLDKGEPVNAADAAALEHDKAYDQQLKAGDNPYLRYNHADAEFQERLQEDTSFGGNLGRAVFQAKKRVLEPFGLVEEGAKTAPGKKRPVEQSPQEPDSSSGIGKTGQQPARKRLNFGQTGDADSVPDPQPLGQPPAAPSGLGTNTMATGSGAPMADNNEGADGVGNSSGNWHCDSQWLGDRVITTSTRTWALPTYNNHLYKQISNSTSGGSSNDNAYFGYSTPWGYFDFNRFHCHFSPRDWQRLINNNWGFRPKRLNFKLFNIQVKEVTQNEGTKTIANNLTSTIQVFTDSEYQLPYVLGSAHQGCLPPFPADVFMIPQYGYLTLNNGSQAVGRSSFYCLEYFPSQMLRTGNNFQFTYTFEDVPFHSSYAHSQSLDRLMNPLIDQYLYYLSRTQTTGGTTNTQTLGFSQGGPNTMANQAKNWLPGPCYRQQRVSKTFADNNNSEYSWTGATKYHLNGRDSLVNPGPAMASHKDDEEKFFPQSGVLIFGKQGSEKTNVDIEKVMITDEEEIRTTNPVATEQYGSVSTNLQRGNRQAATADVNTQGVLPGMVWQDRDVYLQGPIWAKIPHTDGHFHPSPLMGGFGLKHPPPQILIKNTPVPADPPTTFNQSKLNSFITQYSTGQVSVEIEWELQKENSKRWNPEIQYTSNYYKSTSVDFAVNTEGVYSEPRPIGTRYLTRNL

SEQ ID NO: 396 - DNA, 2217 bp, Artificial Sequence
  Description of Artificial Sequence: Synthetic polynucleotide
atggctgccgatggttatcttccagattggctcgaggacactctctctgaaggaataagacagtggtgggcgctgaaacctggagccccgaagcccaaagccaaccagcaaaagcaggacgacggccggggtctggtgcttcctggctacaagtacctcggacccttcaacggactcgacaagggggagcccgtcaacgcggcggatgcagcggccctcgagcacgacaaggcctacgaccagcagctcaaagcgggtgacaatccgtacctgcggtataaccacgccgacgccgagtttcaggagcgtctgcaagaagatacgtcttttgggggcaacctcgggcgagcagtcttccaggccaagaagcgggttctcgaacctctcggtctggttgaggaaggcgctaagacggctcctggaaagaagagaccggtagagccatcaccccagcgttctccagactcctctacgggcatcggcaagaaaggccaacagcccgccagaaaaagactcaattttggtcagactggcgactcagagtcagttccagaccctcaacctctcggagaaccaccagcagcccccacaagtttgggatctaatacaatggcttcaggcggtggcgcaccaatggcagacaataacgagggtgccgatggagtgggtaattcctcaggaaattggcattgcgattcccaatggctgggcgacagagtcatcaccaccagcacccgcacctgggccttgcccacctacaataaccacctctacaagcaaatctccagtgcttcaacgggggccagcaacgacaaccactacttcggctacagcaccccctgggggtattttgactttaaccgcttccactgccacttctcgccaagagactggcaaagactcatcaacaacaattggggattccggcccaagagactcaacttcaaactcttcaacatccaagtcaaggaggtcacgacgaatgatggcgtcacgaccatcgccaataacctcaccagcaccatccaggtgtttacggactcggagtaccagctgccgtacgttctcggctctgcccaccagggctgcctgcctccgttcccggcggacgtgttcatgattccccagtatggatacctcaccctgaacaacggaagtcaagcggtgggacgctcatccttttactgcctggagtacttcccttcgcagatgctaaggactggaaataacttccaattcagctataccttcgaggatgtaccttttcacagcagctacgctcacagccagagtttggatcgcttgatgaatcctcttattgatcagtatctgtactacctgaacagaacgcaaggaacaacctctggaacaaccaaccaatcacggctgctttttagccaggctgggcctcagtctatgtctttgcaggccagaaattggctacctgggccctgctaccggcaacagagactttcaaagactgctaacgacaacaacaacagtaactttccttggacagcagccagcaaatatcatctcaatggccgcgactcgctggtgaatccaggaccagctatggccagtcacaaggacgatgaagaaaaatttttccctatgcacggcaatctaatatttggcaaagaagggacaacggcaagtaacgcagaattagataatgtaatgattacggatgaagaagagattcgtaccaccaatcctgtggcaacagagcagtatggaactgtggcaaataacttgcagagctcaaatacagctcccacgactagaactgtcaatgatcagggggccttacctggcatggtgtggcaagatcgtgacgtgtaccttcaggggcccatctgggcaaagattccacacacggacggacattttcacccctctcccctcatgggtggattcggacttaaacaccctcctccgcagattctcatcaagaacaccccggtacctgcgaatccttcgaccaccttcagtgcggcaaagtttgcttccttcatcacacagtactccacgggacaggtcagcgtggagatcgagtgggagctgcagaaggaaaacagcaagcgctggaacccggagatccagtacacttccaactattacaagtctaataatgttgaatttgctgttaatactgaaggtgtatatagtgaaccccgccccattggcaccagatacctgactcgtaatctgtaa

SEQ ID NO: 397 - protein, 738 aa, Artificial Sequence
  Description of Artificial Sequence: Synthetic polypeptide
MAADGYLPDWLEDTLSEGIRQWWALKPGAPKPKANQQKQDDGRGLVLPGYKYLGPFNGLDKGEPVNAADAAALEHDKAYDQQLKAGDNPYLRYNHADAEFQERLQEDTSFGGNLGRAVFQAKKRVLEPLGLVEEGAKTAPGKKRPVEPSPQRSPDSSTGIGKKGQQPARKRLNFGQTGDSESVPDPQPLGEPPAAPTSLGSNTMASGGGAPMADNNEGADGVGNSSGNWHCDSQWLGDRVITTSTRTWALPTYNNHLYKQISSASTGASNDNHYFGYSTPWGYFDFNRFHCHFSPRDWQRLINNNWGFRPKRLNFKLFNIQVKEVTTNDGVTTIANNLTSTIQVFTDSEYQLPYVLGSAHQGCLPPFPADVFMIPQYGYLTLNNGSQAVGRSSFYCLEYFPSQMLRTGNNFQFSYTFEDVPFHSSYAHSQSLDRLMNPLIDQYLYYLNRTQGTTSGTTNQSRLLFSQAGPQSMSLQARNWLPGPCYRQQRLSKTANDNNNSNFPWTAASKYHLNGRDSLVNPGPAMASHKDDEEKFFPMHGNLIFGKEGTTASNAELDNVMITDEEEIRTTNPVATEQYGTVANNLQSSNTAPTTRTVNDQGALPGMVWQDRDVYLQGPIWAKIPHTDGHFHPSPLMGGFGLKHPPPQILIKNTPVPANPSTTFSAAKFASFITQYSTGQVSVEIEWELQKENSKRWNPEIQYTSNYYKSNNVEFAVNTEGVYSEPRPIGTRYLTRNL

SEQ ID NO: 398 - DNA, 2208 bp, Artificial Sequence; identical to SEQ ID NO: 34
  Description of Artificial Sequence: Synthetic polynucleotide

SEQ ID NO: 399 - protein, 735 aa, Artificial Sequence [sequence omitted]

SEQ ID NO: 400 - DNA, 2208 bp, Artificial Sequence
  Description of Artificial Sequence: Synthetic polynucleotide
atggctgccgatggttatcttccagattggctcgaggacaacctctctgagggcattcgcgagtggtgggcgctgaaacctggagccccgaagcccaaagccaaccagcaaaagcaggacgacggccggggtctggtgcttcctggctacaagtacctcggacccttcaacggactcgacaagggggagcccgtcaacgcggcggacgccgcggccctcgagcacgacaaggcctacgaccagcagctgcaggcgggtgacaatccgtacctgcggtataaccacgccgacgccgagtttcaggagcgtctgcaagaagatacgtcttttgggggcaacctcgggcgagcagtcttccaggccaaaaagaggcttcttgaacctcttggtctggttgaggaagcagctaaaacggctcctggaaagaagaggcctgtagagcagtctcctcaggaaccggactcctccgcgggtattggcaaatcgggtgcacagcccgccaaaaagagactcaatttcggtcagactggcgactcagagtcagtcccagaccctcaacctctcggagaaccaccagcagcccccacaagtttgggatctaatacaatggcttcaggcggtggcgcaccaatggcagacaataacgaaggcgccgacggagtgggtaatgcctcaggaaattggcattgcgattccacatggctgggcgacagagtcatcaccaccagcacccgcacctgggccttgcccacctacagcaaccatctctacaagcaaatctccagccaatcaggagcttcaaacgacaacgactactttggctacagcaccccttgggggtattttgatttcaacagattccactgccacttttcaccacgtgactggcaaagactcatcaacaacaactggggattccgacccaagagactcaacttcaagctctttaacattcaagtcaaagaggtcacgcagaatgacggtacgacgacgattgccaataaccttaccagcacggttcaggtgtttactgactcggagtaccagctcccgtacgtcctcggctcggcgcatcaaggatgcctcccgccgttcccagcagacgtcttcatggtgccacagtatggatacctcaccctgaacaacgggagtcaggcagtaggacgctcttcattttactgcctggagtactttccttctcagatgctgcgtaccggaaacaactttaccttcagctacacttttgaggacgttcctttccacagcagctacgctcacagccagagtctggaccgtctcatgaatcctctcatcgaccagtacctgtattacttgagcagaacaaacactccaagtggaaccaccacgcagtcaaggcttcagttttctcaggccggagcgagtgacattcgggaccagtctaggaactggcttcctggaccctgttaccgccagcagcgagtatcaaagacatctgaggataacaacaacagtgaatactcgtggactggagctaccaagtaccacctcaatggcagagactctctggtgaatccgggcccggccatggcaagccacaaggacgatgaagaaaagttttttcctcagagcggggttctcatctttgggaagcaaggctcagagaaaacaaatgtggacattgaaaaggtcatgattacagacgaagaggaaatcaggacaaccaatcccgtggctacggagcagtatggttctgtatctaccaacctccagagaggcaacagacaagcagctaccgcagatgtcaacacacaaggcgttcttccaggcatggtctggcaggacagagatgtgtaccttcaggggcccatctgggcaaagattccacacacggacggacattttcacccctctcccctcatgggtggattcggacttaaacaccctcctccacagattctcatcaagaacaccccggtacctgcgaatccttcgaccaccttcagtgcggcaaagtttgcttccttcatcacacagtactccacgggacaggtcagcgtggagatcgagtgggagctgcagaaggaaaacagcaaacgctggaatcccgaaattcagtacacttccaactacaacaagtctgttaatgtggactttactgtggacactaatggcgtgtattcagagcctcgccccattggcaccagatacctgactcgtaatctgtaa

SEQ ID NO: 401 - protein, 735 aa, Artificial Sequence
  Description of Artificial Sequence: Synthetic polypeptide
MAADGYLPDWLEDNLSEGIREWWALKPGAPKPKANQQKQDDGRGLVLPGYKYLGPFNGLDKGEPVNAADAAALEHDKAYDQQLQAGDNPYLRYNHADAEFQERLQEDTSFGGNLGRAVFQAKKRLLEPLGLVEEAAKTAPGKKRPVEQSPQEPDSSAGIGKSGAQPAKKRLNFGQTGDSESVPDPQPLGEPPAAPTSLGSNTMASGGGAPMADNNEGADGVGNASGNWHCDSTWLGDRVITTSTRTWALPTYSNHLYKQISSQSGASNDNDYFGYSTPWGYFDFNRFHCHFSPRDWQRLINNNWGFRPKRLNFKLFNIQVKEVTQNDGTTTIANNLTSTVQVFTDSEYQLPYVLGSAHQGCLPPFPADVFMVPQYGYLTLNNGSQAVGRSSFYCLEYFPSQMLRTGNNFTFSYTFEDVPFHSSYAHSQSLDRLMNPLIDQYLYYLSRTNTPSGTTTQSRLQFSQAGASDIRDQSRNWLPGPCYRQQRVSKTSEDNNNSEYSWTGATKYHLNGRDSLVNPGPAMASHKDDEEKFFPQSGVLIFGKQGSEKTNVDIEKVMITDEEEIRTTNPVATEQYGSVSTNLQRGNRQAATADVNTQGVLPGMVWQDRDVYLQGPIWAKIPHTDGHFHPSPLMGGFGLKHPPPQILIKNTPVPANPSTTFSAAKFASFITQYSTGQVSVEIEWELQKENSKRWNPEIQYTSNYNKSVNVDFTVDTNGVYSEPRPIGTRYLTRNL

SEQ ID NO: 402 - DNA, 2208 bp, Artificial Sequence
  Description of Artificial Sequence: Synthetic polynucleotide
atggctgccgatggttatcttccagattggctcgaggacaacctctctgagggcattcgcgagtggtgggcgctgaaacctggagccccgaagcccaaagccaaccagcaaaagcaggacgacggccggggtctggtgcttcctggctacaagtacctcggacccttcaacggactcgacaagggggagcccgtcaacgcggcggacgcagcggccctcgagcacgacaaggcctacgaccagcagctgcaggcgggtgacaatccgtacctgcggtataaccacgccgacgccgagttccaggagcgtctgcaagaagatacgtcttttgggggcaacctcgggcgagcagtcttccaggccaagaagagggttctcgaaccttttggtctggttgaggaaggtgctaagacggctcctggaaagaaacgtccggtagagcagtcgccacaagagccagactcctcctcgggcattggcaagacaggccagcagcccgctaaaaagagactcaattttggtcagactggcgactcagagtcagtcccagaccctcaacctctcggagaaccaccagcagcccccacaagtttgggatctaatacaatggcttcaggcggtggcgcaccaatggcagacaataacgagggcgccgacggagtgggtaattcctcgggaaattggcattgcgattccacatggatgggcgacagagtcatcaccaccagcacccgaacctgggccctgcccacctacaacaaccacctctacaaacaaatttccagccaatcaggagcttcaaacgacaaccactactttggctacagcaccccttgggggtattttgactttaacagattccactgccacttttcaccacgtgactggcagcgactcattaacaacaactggggattccggcccaagaaactcaacttcaagctctttaacatccaggtcaaggaggtcacgcagaatgaaggcaccaagaccatcgccaataacctcaccagcaccatccaggtgtttacggactcggagtaccagctgccgtacgttctcggctctgcccaccagggctgcctgcctccgttcccggcggacgtgttcatgattccccagtacggctacctaacactcaacaacggtagtcaggccgtgggacgctcctccttctactgcctggaatactttccttcgcagatgctgagaaccggcaacaacttccagtttacttacaccttcgaggacgtgcctttccacagcagctacgcccacagccagagcttggaccggctgatgaatcctctgattgaccagtacctgtattacttgtctcggactcaaacaacaggaggcacgacaaatacgcagactctgggcttcagccaaggtgggcctaatacaatggccaatcaggcaaagaactggctgcctggaccctgttaccgccagcagcgagtatcaaagacatctgcggataacaacaacagtgaatactcgtggactggagctaccaagtaccacctcaatggcagagactctctggtgaatccgggcccggccatggcaagccacaaggacgatgaagaaaagttttttcctcagagcggggttctcatctttgggaagcaaggctcagagaaaacaaatgtggacattgaaaaggttatgattacagacgaagaggaaatcaggacaaccaatcccgtggctacggagcagtatggttctgtatctaccaacctccagagaggcaacagacaagcagctaccgcagatgtcaacacacagggcgttcttccaggcatggtctggcaggacagagatgtgtaccttcagggtcccatttgggccaaaattcctcacacagatggacactttcacccgtcccctcttatgggcggctttggactcaagaacccgcctcctcagatcctcatcaaaaacacgcctgttcctgcgaatcctccggcagagttttcagctacaaagtttgcttcattcatcacccaatactccacaggacaagtgagtgtggaaattgaatgggagctgcagaaagaaaacagcaagcgctggaatcccgaagtgcagtacacatccaattatgcaaaatctgccaacgttgattttactgtggacactaatggcgtgtattcagagcctcgccccattggcaccagatacctcacccgtaatctgtaa

SEQ ID NO: 403 - protein, 735 aa, Artificial Sequence
  Description of Artificial Sequence: Synthetic polypeptide
MAADGYLPDWLEDNLSEGIREWWALKPGAPKPKANQQKQDDGRGLVLPGYKYLGPFNGLDKGEPVNAADAAALEHDKAYDQQLQAGDNPYLRYNHADAEFQERLQEDTSFGGNLGRAVFQAKKRVLEPFGLVEEGAKTAPGKKRPVEQSPQEPDSSSGIGKTGQQPAKKRLNFGQTGDSESVPDPQPLGEPPAAPTSLGSNTMASGGGAPMADNNEGADGVGNSSGNWHCDSTWMGDRVITTSTRTWALPTYNNHLYKQISSQSGASNDNHYFGYSTPWGYFDFNRFHCHFSPRDWQRLINNNWGFRPKKLNFKLFNIQVKEVTQNEGTKTIANNLTSTIQVFTDSEYQLPYVLGSAHQGCLPPFPADVFMIPQYGYLTLNNGSQAVGRSSFYCLEYFPSQMLRTGNNFQFTYTFEDVPFHSSYAHSQSLDRLMNPLIDQYLYYLSRTQTTGGTTNTQTLGFSQGGPNTMANQAKNWLPGPCYRQQRVSKTSADNNNSEYSWTGATKYHLNGRDSLVNPGPAMASHKDDEEKFFPQSGVLIFGKQGSEKTNVDIEKVMITDEEEIRTTNPVATEQYGSVSTNLQRGNRQAATADVNTQGVLPGMVWQDRDVYLQGPIWAKIPHTDGHFHPSPLMGGFGLKNPPPQILIKNTPVPANPPAEFSATKFASFITQYSTGQVSVEIEWELQKENSKRWNPEVQYTSNYAKSANVDFTVDTNGVYSEPRPIGTRYLTRNL

SEQ ID NO: 404 - DNA, 2214 bp, Artificial Sequence; identical to SEQ ID NO: 394
  Description of Artificial Sequence: Synthetic polynucleotide

SEQ ID NO: 405 - protein, 737 aa, Artificial Sequence; identical to SEQ ID NO: 395
  Description of Artificial Sequence: Synthetic polypeptide

SEQ ID NO: 406 - DNA, 2196 bp, Adeno-associated virus
atggctgctgacggttatcttccagattggctcgaggacaacctctctgagggcattcgcgagtggtgggcgctgaaacctggagccccgcaacccaaagccaaccagcaaaagcaggacgacggccggggtctggtgcttcctggctacaagtacctcggacccttcaacggactcgacaagggggagcccgtcaacgaggcggacgccgcggccctcgagcacgacaaggcctacgaccagcagctcaaagcgggtgacaatccgtacctgcggtataatcacgccgacgccgagtttcaagagcgtctgcaagaagatacgtcctttgggggcaacctcgggcgagcagtcttccaggccaaaaagagggtactcgagcctctgggtctggttgaggaaggcgctaagacggctcctggaaagaagcggccagtagaaccggactccagctcgggcatcggcaagtcaggccagcagcccgcgaaaaagagactgaattttgggcagactggcgactcagagtcagtgcctgacccccaacctctctcagaaccacccgcaggtccctctggtctgggatctggtacaatggctgctggcggtggcgctccaatggcagacaataacgaaggcgccgacggagtgggtaatgtctcaggaaattggcattgcgattccacatggctgggcgaccgagtcatcaccaccagcactcggacctgggccctccccacctacaacaaccacctctacaagcaaatctccaacgggacctcgggaggcagcagcaacgacaacacctactttggctacagcaccccctgggggtattttgactttaacagattccactgccacttttcaccacgtgactggcagcgactcatcaacaacaactgggggttccggcccaagaagctcaacttcaagctcttcaacatccaggtcaaggaggtcacccagaatgaaggcaccaagaccatcgccaataacctcaccagcacggtgcaggtctttacggactcggagtaccagctcccgtacgtgctcggctctgcccaccagggctgcctgcctccgttcccggcggacgtgttcatgattccgcagtacgggtacctgacgctgaacaacgggagccaggccgtggggcgatcctccttctactgcctggagtactttccctcgcagatgctgagaacgggcaacaactttaccttcagctacaccttcgaggacgtgcccttccacagcagctacgcgcacagccagagcctggaccggctgatgaacccgctgattgaccagtacctgtactacctgtctcggactcagaccaacgggaccaatgccacgcagactctgttgtttgctcaggccgggcctcagaacatgtcggctcaggccaagaactggctgcctggtccttgctatcggcagcagcgcgtctctacgacagtgtcgcaaaacaacaacagcaactttacctggaccggggcgaccaagtaccacctgaacggccgagactccctggtgagccccggtgtcgccatggcaacgcacaaggacgacgaggagcgcttcttcccgagcagcggggtcctgatgtttggcaagcagggcgctggaaaggacaatgtcgagtacaccaacgtgatgctcaccagcgaggaggagatcaagaccaccaaccctgtggccacggagcagtacggcgtggtggctgacaatctgcagcagaccaactcagctcccattgtgggggcagtcaacagccagggggccttacccggtatggtctggcagaaccgggacgtgtacctgcagggtcccatctgggccaagatcccgcatacggacggcaactttcacccgtctcctctcatgggcggctttggactgaaacacccgcctccccagatcctgatcaaaaacacgccggtacctgcggatcccccggtgaactttacggacgctaagctggcgagtttcatcacgcagtacagcaccgggcaggtcagcgtggagattgagtgggagctgcagaaggagaacagcaagcgctggaatcccgagattcagtacacttccaattattataaatcagctaatgtggactttgccgtcaatgcagatggtgtatatagtgaaccccgccccattggcactcgttacctcacccgtaatctgtaa

SEQ ID NO: 407 - protein, 731 aa, Adeno-associated virus
MAADGYLPDWLEDNLSEGIREWWALKPGAPQPKANQQKQDDGRGLVLPGYKYLGPFNGLDKGEPVNEADAAALEHDKAYDQQLKAGDNPYLRYNHADAEFQERLQEDTSFGGNLGRAVFQAKKRVLEPLGLVEEGAKTAPGKKRPVEPDSSSGIGKSGQQPAKKRLNFGQTGDSESVPDPQPLSEPPAGPSGLGSGTMAAGGGAPMADNNEGADGVGNVSGNWHCDSTWLGDRVITTSTRTWALPTYNNHLYKQISNGTSGGSSNDNTYFGYSTPWGYFDFNRFHCHFSPRDWQRLINNNWGFRPKKLNFKLFNIQVKEVTQNEGTKTIANNLTSTVQVFTDSEYQLPYVLGSAHQGCLPPFPADVFMIPQYGYLTLNNGSQAVGRSSFYCLEYFPSQMLRTGNNFTFSYTFEDVPFHSSYAHSQSLDRLMNPLIDQYLYYLSRTQTNGTNATQTLLFAQAGPQNMSAQAKNWLPGPCYRQQRVSTTVSQNNNSNFTWTGATKYHLNGRDSLVSPGVAMATHKDDEERFFPSSGVLMFGKQGAGKDNVEYTNVMLTSEEEIKTTNPVATEQYGVVADNLQQTNSAPIVGAVNSQGALPGMVWQNRDVYLQGPIWAKIPHTDGNFHPSPLMGGFGLKHPPPQILIKNTPVPADPPVNFTDAKLASFITQYSTGQVSVEIEWELQKENSKRWNPEIQYTSNYYKSANVDFAVNADGVYSEPRPIGTRYLTRNL

SEQ ID NO: 408 - DNA, 2196 bp, Adeno-associated virus
atggctgctgacggttatcttccagattggctcgaggacaacctctctgagggcattcgcgagtggtgggcgctgaaacctggagccccgcaacccaaagccaaccagcaaaagcaggacgacggccggggtctggtgcttcctggctacaagtacctcggacccttcaacggactcgacaagggggagcccgtcaacgaggcggacgccgcggccctcgagcacgacaaggcctacgaccagcagctcaaagcgggtgacaatccgtacctgcggtataatcacgccgacgccgagtttcaagagcgtctgcaagaagatacgtcctttgggggcaacctcgggcgagcagtcttccaggccaaaaagagggtactcgagcctctgggtctggttgaggaaggcgctaagacggctcctggaaagaagcggccagtagaaccggactccagctcgggcatcggcaagtcaggccggcagcccgcgaaaaagagactgaattttgggcagactggcgactcagagtcagtgcctgacccccaacctctctcagaaccacccgcaggtccctctggtctgggatctggtacaatggctgcaggcggtggcgctccaatggcagacaataacgaaggcgccgacggagtgggtaatgcctcaggaaattggcattgcgattccacatggctgggcgaccgagtcatcaccaccagcactcggacctgggccctccccacctacaacaaccacctctacaagcaaatctccaacgggacctcgggaggcagcagcaacgacaacacctactttggctacagcaccccctgggggtattttgactttaacagattccactgccacttttcaccacgtgactggcagcgactcatcaacaacaactggggattccggcccaagaggctcaacttcaagctcttcaacatccaggtcaaggaggtcacccagaatgaaggcaccaagaccatcgccaataacctcaccagcacggtgcaggtctttacggactcgaagtaccagctcccgtacgtgctcggctctgcccaccagggctgcctgcctccgttcccggcggacgtgttcatgattccgcagtacgggtacctgacgctgaacaacgggagccaggccgtggggcgatcctccttctactgcctggagtactttccctcgcagatgctgagaacgggcaacaactttaccttcagctacaccttcgaggacgtgcccttccacagcagctacgcgcacagccagagcctggaccggctgatgaacccgctgattgaccagtacctgtactacctgtctcggactcagaccaacgggaccaatgccacgcagactctgttgtttgctcaggccgggcctcagaacatgtcggctcaggccaagaactggctgcctggtccttgctatcggcagcagcgcgtctctacgacagtgtcgcaaaacaacaacagcaactttacctggaccggggcgaccaagtaccacctgaacggccgagactccctggtgaaccccggtgtcgccatggcaacgcacaaggacgacgaggagcgcttcttcccgagcagcggggtcctgatgtttggcaagcagggcgctggaaaggacaatgtcgagtacaccaacgtgatgctcaccagcgaggaggagatcaagaccaccaaccctgtggccacggagcagtacggtgtggtggctgacaatctgcagcagaccaactcggctcccattgtgggggcagtcaacagccagggggccttacccggtatggtctggcagaaccgggacgtgtacctgcagggtcccatctgggccaagatcccgcatacggacggcaactttcacccgtctcctctcatgggcggctttggactgaaacacccgcctccccagatcctgatcaaaaacacgccggtacctgcggatcccccggtgaactttacggacgctaagctggcgagtttcatcacgcagtacagcaccgggcaggtcagcgtggagattgagtgggagctgcagaaggagaacagcaagcgctggaatcccgagattcagtacacttccaattattataaatcagctaatgtggactttgccgtcaatgcagatggtgtatatagtgaaccccgccccattggcactcgttacctcacccgtaatctgtaa

SEQ ID NO: 409 - protein, 731 aa, Adeno-associated virus
MAADGYLPDWLEDNLSEGIREWWALKPGAPQPKANQQKQDDGRGLVLPGYKYLGPFNGLDKGEPVNEADAAALEHDKAYDQQLKAGDNPYLRYNHADAEFQERLQEDTSFGGNLGRAVFQAKKRVLEPLGLVEEGAKTAPGKKRPVEPDSSSGIGKSGRQPAKKRLNFGQTGDSESVPDPQPLSEPPAGPSGLGSGTMAAGGGAPMADNNEGADGVGNASGNWHCDSTWLGDRVITTSTRTWALPTYNNHLYKQISNGTSGGSSNDNTYFGYSTPWGYFDFNRFHCHFSPRDWQRLINNNWGFRPKRLNFKLFNIQVKEVTQNEGTKTIANNLTSTVQVFTDSKYQLPYVLGSAHQGCLPPFPADVFMIPQYGYLTLNNGSQAVGRSSFYCLEYFPSQMLRTGNNFTFSYTFEDVPFHSSYAHSQSLDRLMNPLIDQYLYYLSRTQTNGTNATQTLLFAQAGPQNMSAQAKNWLPGPCYRQQRVSTTVSQNNNSNFTWTGATKYHLNGRDSLVNPGVAMATHKDDEERFFPSSGVLMFGKQGAGKDNVEYTNVMLTSEEEIKTTNPVATEQYGVVADNLQQTNSAPIVGAVNSQGALPGMVWQNRDVYLQGPIWAKIPHTDGNFHPSPLMGGFGLKHPPPQILIKNTPVPADPPVNFTDAKLASFITQYSTGQVSVEIEWELQKENSKRWNPEIQYTSNYYKSANVDFAVNADGVYSEPRPIGTRYLTRNL

SEQ ID NO: 410 - DNA, 2196 bp, Adeno-associated virus
atggctgctgacggttatcttccagattggctcgaggacaacctctctgagggcattcgcgagtggtgggcgctgaaacctggagccccgcaacccaaagccaaccagcaaaagcaggacgacggccggggtctggtgcttcctggctacaagtacctcggacccttcaacggactcgacaagggggagcccgtcaacgaggcggacgccgcggccctcgagcacgacaaggcctacgaccagcagctcaaagcgggtgacaatccgtacctgcggtataatcacgccgacgccgagtttcaagagcgtctgcaagaagatacgtcctttgggggcaacctcgggcgagcagtcttccaggccaaaaagagggtactcgagcctctgggtctggttgaggaaggcgctaagacggctcctggaaagaagcggccagtagaaccggactccagctcgggcatcggcaagtcaggccagcagcccgcgaaaaagagactgaattttgggccgactggcgactcagagtcagtgcctgacccccaacctctctcagaaccacctgcaggtccctctggtctgggatctggtacaatggctgcaggcggtggcgctccaatggcagacaataacgaaggcgccgacggagtgggtaatgtctcaggaaattggcattgcgattccacatggctgggcgaccgagtcatcaccaccagcactcggacctgggccctccccacctacaacaaccacctctacaagcaaatctccaacgggacctcgggaggcagcagcaacgacaacacctactttggctacagcaccccctgggggtattttgactttaacagattccactgccacttttcaccacgcgactggcagcgactcatcaacaacaactggggattccggcccaagaagctcaacttcaagctcttcaacatccaggtcaaggaggtcacccagaatgaaggcaccaagaccaccgccaataacctcaccagcacggtgcaggtctttacggactcggagtaccagctcccgtacgtgctcggctctgcccaccagggctgcctgcctccgttcccggcggacgtgttcatgattccgcagtacgggtacctgacgctgaacaacgggagccaggccgtggggcgatcctccttctactgcctggagtactttccctcgcagatgctgagaacgggcaacaactttaccttcagctacaccttcgaggacgtgcccttccacagcagctacgcgcacagccagagcctggaccggctgatgaacccgctgattgaccagtacctgtactacctgtctcggactcagaccaacgggaccaatgccacgcagactctgttgtttgctcaggccgggcctcagaacatgtcggctcaggccaagaactggctgcctggtccttgctatcggcagcagcgcgtctctacggcagtgtcgcaaaacaacaacagcaactttacctggaccggggcgaccaagtaccacctgaacggccgagactccctggtgaaccccggtgtcgccatggcaacgcacaaggacgacgaggagcgcttcttcccgagcagcggggtcctgatgtttggcaagcagggcgctggaaaggacaatgtcgagtacaccaacgtgatgctcaccagcgaggaggagatcaagaccaccaaccctgtggccacggagcagtacggtgtggtggctgacaatctgcagcagaccaactcggctcccattgtgggggcagtcaacagccagggggccttacccggtatggtctggcagaaccgggacgtgtacctgcagggtcccatctgggccaagatcccgcatacggacggcaactttcacccgtctcctctcatgggcggctttggactgaaacacccgcctccccagatcctgatcaaaaacacgccggtacctgcggatcccccggtgaactttacggacgctaagctggcgagtttcatcacgcagtacagcaccgggcaggtcagcgtggagattgagtgggagctgcagaaggagaacagcaagcgctggaatcccgagattcagtacacttccaattattataaatcagctaatgtggactttgccgtcaatgcagatggtgtatatagcgaaccccgccccattggcactcgttacctcacccgtaatctgtaa

SEQ ID NO: 411 - protein, 731 aa, Adeno-associated virus
MAADGYLPDWLEDNLSEGIREWWALKPGAPQPKANQQKQDDGRGLVLPGYKYLGPFNGLDKGEPVNEADAAALEHDKAYDQQLKAGDNPYLRYNHADAEFQERLQEDTSFGGNLGRAVFQAKKRVLEPLGLVEEGAKTAPGKKRPVEPDSSSGIGKSGQQPAKKRLNFGPTGDSESVPDPQPLSEPPAGPSGLGSGTMAAGGGAPMADNNEGADGVGNVSGNWHCDSTWLGDRVITTSTRTWALPTYNNHLYKQISNGTSGGSSNDNTYFGYSTPWGYFDFNRFHCHFSPRDWQRLINNNWGFRPKKLNFKLFNIQVKEVTQNEGTKTTANNLTSTVQVFTDSEYQLPYVLGSAHQGCLPPFPADVFMIPQYGYLTLNNGSQAVGRSSFYCLEYFPSQMLRTGNNFTFSYTFEDVPFHSSYAHSQSLDRLMNPLIDQYLYYLSRTQTNGTNATQTLLFAQAGPQNMSAQAKNWLPGPCYRQQRVSTAVSQNNNSNFTWTGATKYHLNGRDSLVNPGVAMATHKDDEERFFPSSGVLMFGKQGAGKDNVEYTNVMLTSEEEIKTTNPVATEQYGVVADNLQQTNSAPIVGAVNSQGALPGMVWQNRDVYLQGPIWAKIPHTDGNFHPSPLMGGFGLKHPPPQILIKNTPVPADPPVNFTDAKLASFITQYSTGQVSVEIEWELQKENSKRWNPEIQYTSNYYKSANVDFAVNADGVYSEPRPIGTRYLTRNL

SEQ ID NO: 412 - DNA, 4404 bp, Adeno-associated virus
atggctgccgatggttatcttccagattggctcgagggcaacctctctgagggcattcgcgagtggtgggacttgaaacctggagccccgaaacccaaagccaaccagcaaaagcaggacgacggccggggtctggtgcttcctggctacaggtacctcggacccttcaacggactcgacaagggagagccggtcaacgaggcagacgccgcggccctcgagcacgacaaggcctacgacaagcagctcgagcagggggacaacccgtacctcaagtacaaccacgccgacgccgagtttcaggagcgtcttcaagaagatacgtcttttgggggcaacctcgggcgagcagtcttccaggccaagaagcgggttctcgaacctctcggtctggttgaggaaggcgctaagacggctcctggaaagaagagacccatagaatcccccgactcctccacgggcatcggcaagaacggccagccgcccgctaaaaagaagctcaactttgggcagactggcgactcagagtcagtgcccgacccccaacctctcggagaacctcccgccgcgccctcaggtctgggatctggtacaatggctgcaggcggtggcgcaccaatggcagacaataacgaaggcgccgacggagtgggtaatgcctccggaaattggcattgcgattccacatggctgggcgacagagtcatcaccaccagcacccgcacctgggccctgcccacctacaacaaccacctctacaagcagatatcaagtcagagcggggctaccaacgacaaccacttcttcggctacagcaccccctggggctattttgacttcaacagattccactgccacttctcaccacgtgactggcagcgactcatcaacaacaactggggattccggcccagaaagctgcggttcaagttgttcaacatccaggtcaaggaggtcacgacgaacgacggcgttacgaccatcgctaataaccttaccagcacgattcaggtcttctcggactcggagtaccaactgccgtacgtcctcggctctgcgcaccagggctgcctccctccgttccctgcggacgtgttcatgattcctcagtacggatatctgactctaaacaacggcagtcagtctgtgggacgttcctccttctactgcctggagtactttccttctcagatgctgagaacgggcgataactttgaattcagctacacctttgaggaagtgcctttccacagcagctatgcgcacagccagagcctggaccggctgatgaatcccctcatcgaccagtacctgtactacctggcccggacccagagcactacggggtccacaagggagctgcagttccatcaggctgggcccaacaccatggccgagcaatcaaagaactggctgcccggaccctgttatcggcagcagagactgtcaaaaaacatagacagcaacaacaacagtaactttgcctggaccggggccactaaataccatctgaatggtagaaattcattaaccaacccgggcgtagccatggccaccaacaaggacgacgaggaccagttctttcccatcaacggagtgctggtttttggcaaaacgggggctgccaacaagacaacgctggaaaacgtgctaatgaccagcgaggaggagatcaaaaccaccaatcccgtggctacagaagaatacggtgtggtctccagcaacctgcaatcgtctacggccggaccccagacacagactgtcaacagccagggggctctgcccggcatggtctggcagaaccgggacgtgtacctgcagggtcccatctgggccaaaattcctcacacggacggcaactttcacccgtctcccctgatgggcggatttggactcaaacacccgcctcctcaaattctcatcaaaaacaccccggtacctgctaatcctccagaggtgtttactcctgccaagtttgcctcatttatcacgcagtacagcaccggccaggtcagcgtggagatcgagtgggaactgcagaaagaaaacagcaaacgctggaatccagagattcagtacacctcaaattatgccaagtctaataatgtggaatttgctgtcaacaacgaaggggtttatactgagcctcgccccattggcacccgttacctcacccgtaacctgtaaatggctgccgatggttatcttccagattggctcgaggacaacctctctgagggcattcgcgagtggtgggacttgaaacctggagccccgaaacccaaagccaaccagcaaaagcaggacgacggccggggtctggtgcttcctggctacaagtacctcggacccttcaacggactcgacaagggggagcccgtcaacgcggcggacgcagcggccctcgagcacgacaaggcctacgaccagcagctcaaagcgggtgacaatccgtacctgcggtataaccacgccgacgccgagtttcaggagcgtctgcaagaagatacgtcttttgggggcaacctcgggcgagcagtcttccaggccaagaagcgggttctcgaacctctcggtctggttgaggaaggcgctaagacggctcctggaaagaagagaccggtagagccatcaccccagcgttctccagactcctctacgggcatcggcaagaaaggccagcagcccgcgaaaaagagactcaactttgggcagactggcgactcagagtcagtgcccgaccctcaaccaatcggagaaccccccgcaggcccctctggtctgggatctggtacaatggctgcaggcggtggcgctccaatggcagacaataacgaaggcgccgacggagtgggtagttcctcaggaaattggcattgcgattccacatggctgggcgacagagtcatcaccaccagcacccgaacctgggccctccccacctacaacaaccacctctacaagcaaatctccaacgggacttcgggaggaagcaccaacgacaacacctacttcggctacagcaccccctgggggtattttgactttaacagattccactgccacttctcaccacgtgactggcagcgactcatcaacaacaactggggattccggcccaagagactcaacttcaagctcttcaacatccaggtcaaggaggtcacgcagaatgaaggcaccaagaccatcgccaataaccttaccagcacgattcaggtctttacggactcggaataccagctcccgtacgtcctcggctctgcgcaccagggctgcctgcctccgttcccggcggacgtcttcatgattcctcagtacgggtacctgactctgaacaatggcagtcaggccgtgggccgttcctccttctactgcctggagtactttccttctcaaatgctgagaacgggcaacaactttgagttcagctaccagtttgaggacgtgccttttcacagcagctacgcgcacagccaaagcctggaccggctgatgaaccccctcatcgaccagtacctgtactacctgtctcggactcagtccacgggaggtaccgcaggaactcagcagttgctattttctcaggccgggcctaataacatgtcggctcaggccaaaaactggctacccgggccctgctaccggcagcaacgcgtctccacgacactgtcgcaaaataacaacagcaactttgcctggaccggtgccaccaagtatcatctgaatggcagagactctctggtaaatcccggtgtcgctatggcaacccacaaggacgacgaagagcgattttttccgtccagcggagtcttaatgtttgggaaacagggagctggaaaagacaacgtggactatagcagcgttatgctaaccagtgaggaagaaattaaaaccaccaacccagtggccacagaacagtacggcgtggtggccgataacctgcaacagcaaaacgccgctcctattgtaggggccgtcaacagtcaaggagccttacctggcatggtctggcagaaccgggacgtgtacctgcagggtcctatctgggccaagattcctcacacggacggaaactttcatccctcgccgctgatgggaggctttggactgaaacacccgcctcctcagatcctgattaagaatacacctgttcccgcggatcctccaactaccttcagtcaagctaagctggcgtcgttcatcacgcagtacagcaccggacaggtcagcgtggaaattgaatgggagctgcagaaagaaaacagcaaacgctggaacccagagattcaatacacttccaactactacaaatctacaaatgtggactttgctgttaacacagatggcacttattctgagcctcgccccatcggcacccgttacctcacccgtaatctgtaa

SEQ ID NO: 413 - protein, 738 aa, Adeno-associated virus; identical to SEQ ID NO: 31

SEQ ID NO: 414 - DNA, 3129 bp, Adeno-associated virus
gaattcgccctttctacggctgcgtcaactggaccaatgagaactttcccttcaacgattgcgtcgacaagatggtgatctggtgggaggagggcaagatgacggccaaggtcgtggagtccgccaaggccattctcggcggcagcaaagtgcgcgtggaccaaaagtgcaagtcgtccgcccagatcgaccccacccccgtgatcgtcacctccaacaccaacatgtgcgccgtgattgacgggaacagcaccaccttcgagcaccagcagccgttgcaggaccggatgttcaagtttgaactcacccgccgtctggagcacgactttggcaaggtgacaaagcaggaagtcagagagttcttccgctgggcgcaggatcacgtgaccgaggtggcgcacgagttctacgtcagaaagggtggagccaacaagagacccgcccccgatgacgcggataaaagcgagcccaagcgggcctgcccctcagtcgcggatccatcgacgtcagacgcggaaggagctccggtggactttgccgacaggtaccaaaacaaatgttctcgtcacgcgggcatgcttcagatgctgtttccctgcaaaacatgcgagagaatgaatcagaatttcaacatttgcttcacgcacgggaccagagactgttcagaatgtttccccggcgtgtcagaatctcaaccggtcgtcagaaaaaagacgtatcggaaactctgtgcgattcatcatctgctgggggcgggcacccgagattgcttgctcggcctgcgatctggtcaacgtggacctagatgactgtgtttctgagcaataaatgacttaaaccaggtatggctgccgatggttatcttccagattggctcgaggacaacctctctgagggcattcgcgagtggtgggacttgaaacctggagccccgaaacccaaagccaaccagcaaaagcaggacgacggccggggtctggtgcttcctggctacaagtacctcggacccttcaacggactcgacaagggggagcccgtcaacgcggcggacgcagcggccctcgagcacgacaaggcctacgaccagcagctcaaagcgggtgacaatccgtacctgcggtataaccacgccgacgccgagtttcaggagcgtctgcaagaagatacgtcttttgggggcaacctcgggcgagcagtcttccaggccaagaagcgggttctcgaacctctcggtctggttgaggaaggcgctaagacggctcctggaaagaagagaccggtagagccatcaccccagcgttctccagactcctctacgggcatcggcaagaaaggccagcagcccgcgaaaaagagactcaactttgggcagactggcgactcagagtcagtgcccgaccctcaaccaatcggagaaccccccgcaggcccctctggtctgggatctggtacaatggctgcaggcggtggcgctccaatggcagacaataacgaaggcgccgacggagtgggtagttcctcaggaaattggcattgcgattccacatggctgggcgacagagtcatcaccaccagcacccgaacctgggccctccccacctacaacaaccacctctacaagcaaatctccaacgggacttcgggaggaagcaccaacgacaacacctacttcggctacagcaccccctgggggtattttgactttaacagattccactgccacttctcaccacgtgactggcagcgactcatcaacaacaactggggattccggcccaagagactcaacttcaagctcttcaacatccaggtcaaggaggtcacgcagaatgaaggcaccaagaccatcgccaataaccttaccagcacgattcaggtctttacggactcggaataccagctcccgtacgtcctcggctctgcgcaccagggctgcctgcctccgttcccggcggacgtcttcatgattcctcagtacgggtacctgactctgaacaatggcagtcaggccgtgggccgttcctccttctactgcctggagtactttccttctcaaatgctgagaacgggcaacaactttgagttcagctaccagtttgaggacgtgccttttcacagcagctacgcgcacagccaaagcctggaccggctgatgaaccccctcatcgaccagtacctgtactacctgtctcggactcagtccacgggaggtaccgcaggaactcagcagttgctattttctcaggccgggcctaataacatgtcggctcaggccaaaaactggctacccgggccctgctaccggcagcaacgcgtctccacgacactgtcgcaaaataacaacagcaactttgcctggaccggtgccaccaagtatcatctgaatggcagagactctctggtaaatcccggtgtcgctatggcaacccacaaggacgacgaagagcgattttttccgtccagcggagtcttaatgtttgggaaacagggagctggaaaagacaacgtggactatagcagcgttatgctaaccagtgaggaagaaattaaaaccaccaacccagtggccacagaacagtacggcgtggtggccgataacctgcaacagcaaaacgccgctcctattgtaggggccgtcaacagtcaaggagccttacctggcatggtctggcagaaccgggacgtgtacctgcagggtcctatctgggccaagattcctcacacggacggaaactttcatccctcgccgctgatgggaggctttggactgaaacacccgcctcctcagatcctgattaagaatacacctgttcccgcggatcctccaactaccttcagtcaagctaagctggcgtcgttcatcacgcagtacagcaccggacaggtcagcgtggaaattgaatgggagctgcagaaagaaaacagcaaacgctggaacccagagattcaatacacttccaactactacaaatctacaaatgtggactttgctgttaacacagatggcacttattctgagcctcgccccatcggcacccgttacctcacccgtaatctgtaattgcttgttaatcaataaaccggttgattcgtttcagttgaactttggtctctgcgaagggcgaattc

SEQ ID NO: 415 - protein, 738 aa, Adeno-associated virus; identical to SEQ ID NO: 31

SEQ ID NO: 416 - protein, 733 aa, Adeno-associated virus
MAADGYLPDWLEDNLSEGIREWWDLRPGAPKPKANQQKQDDGRGLVLPGYKYLGPFNGLDKGEPVNEADAAALEHDKAYDKQLEQGDNPYLKYNHADAEFQERLQEDTSFGGNLGRAVFQAKKRVLEPLGLVEEGAKTAPGKKRPIESPDSSTGIGKKGQQPAKKRLNFGQTGDSESVPDPQPIGEPPAGPSGLGSGTMAAGGGAPMADNNEGADGVGSSSGNWHCDSTWLGDRVITTSTRTWALPTYNNHLYKQISNGTSGGSTNDNTYFGYSTPWGYFDFNRFHCHFSPRDWQRLINNNWGFRPKRLNFKLFNIQVKEVTQNEGTKTIANNLTSTIQVFTDSEYQLPYVLGSAHQGCLPPFPADVFMIPQYGYLTLNNGSQAVGRSSFYCLEYFPSQMLRTGNNFEFSYQFEDVPFHSSYAHSQSLDRLMNPLIDQYLYYLSRTQSTGGTAGTQQLLFSQAGPNNMSAQAKNWLPGPCYRQQRVSTTVSQNNNSNFAWTGATKYHLNGRDSLVNPGVAMATHKGDEERFFPSSGVLMFGKQGAGKDNVDYSSVMLTSEEEIKTTNPVATEQYGVVADNLQQQNAAPIVGAVNSQGALPGMVWQNRDVYLQGPIWAKIPHTDGNFHPSPLMGGFGLKHPPPQILIKNTPVPADPPTTFSQAKLASFITQYSTGQVSVEIEWELQKENSKRWNPEIQYTSNYYKSTNVDFAVNTEGTYSEPRPIGTRYLTRNL

SEQ ID NO: 417 - DNA, 2501 bp, Adeno-associated virus
gaattcgcccttggctgcgtcaactggaccaatgagaactttcccttcaacgattgcgtcgacaagatggtgatctggtgggaggagggcaagatgacggccaaggtcgtggagtccgccaaggccattcatcatctgctggggcgggctcccgagattgcttgctcggcctgcgatctggtcaacgtggacctggatgactgtgtttctgagcaataaatgacttaaaccaggtatggctgccgatggttatcttccagattggctcgaggacaacctctctgagggcattcgcgagtggtgggacttgagacctggagccccgaaacccaaagccaaccagcaaaagcaggacgacggccggggtctggtgcttcctggctacaagtacctcggacccttcaacggactcgacaagggagagccggtcaacgaggcagacgccgcggccctcgagcacgacaaggcctacgacaagcagctcgagcagggggacaacccgtacctcaagtacaaccacgccgacgccgagtttcaggagcgtcttcaagaagatacgtcttttgggggcaacctcgggcgagcagtcttccaggccaagaagcgggttctcgaacctctcggtctggttgaggaaggcgctaagacggctcctggaaagaagagacccatagaatcccccgactcctccacgggcatcggcaagaaaggccagcagcccgctaaaaagagactcaactttgggcagactggcgactcagagtcagtgcccgaccctcaaccaatcggagaaccccccgcaggcccctctggtctgggatctggcacaatggctgcaggcggtggcgctccaatggcagacaataacgaaggcgccgacggagtgggtagttcctcaggaaattggcattgcgattccacatggctgggcgacagagtcatcaccaccagcacccgaacctgggccctccccacctacaacaaccacctctacaagcaaatctccaacgggacatcgggaggaagcaccaacgacaacacctacttcggctacagcaccccctgggggtattttgactttaacagattccactgccacttctcaccacgtgactggcagcgactcatcaacaacaactggggattccggcccaagagactcaacttcaagctcttcaacatccaggtcaaggaggtcacgcagaatgaaggcaccaagaccatcgccaataaccttaccagcacgattcaggtctttacggactcggaataccagctcccgtacgtcctcggctctgcgcaccagggctgcctgcctccgttcccggcggacgtcttcatgattcctcagtacgggtacctgactctgaacaacggcagtcaggccgtgggccgttcctccttctactgcctggagtactttccttctcaaatgctgagaacgggcaacaactttgagttcagctaccagtttgaggacgtgccttttcacagcagctatgcgcacagccaaagcctggaccggctgatgaaccccctcatcgaccagtacctgtactacctgtctcggactcagtccacgggaggtaccgcaggaactcagcagttgctattttctcaggccgggcctaataacatgtcggctcaggccaaaaactggctacccgggccctgctaccggcagcaacgcgtctccacgacagtgtcgcaaaataacaacagcaactttgcttggaccggtgccaccaagtatcatctgaatggcagagactctctggtaaatcccggtgtcgctatggcaacgcacaagggcgacgaagagcgattttttccatccagcggagtcttgatgtttgggaaacagggagctggaaaagacaacgtagactatagcagcgttatgctaaccagtgaggaagaaatcaaaaccaccaacccagtggccacagaacagtacggcgtggtggccgataacctgcaacagcaaaacgccgctcctattgtaggggccgtcaacagtcaaggagccttacctggcatggtctggcagaaccgggacgtgtacctgcagggtcctatctgggccaagattcctcacacggacggcaactttcatccttcgccgctgatgggaggctttggactgaaacacccgcctcctcagatcctgattaagaatacacctgttcccgcggatcctccaactaccttcagtcaagccaagctggcgtcgttcatcacgcagtacagcaccggacaggtcagcgtggaaattgaatgggagctgcagaaagagaacagcaagcgctggaacccagagattcagtatacttccaactactacaaatctacaaatgtggactttgctgtcaatactgagggtacttattcagagcctcgccccattggcacccgttacctcacccgtaacctgtaattgcctgttaatcaataaaccggttgattcgtttcagttgaactttggtctcaagggcgaattc

SEQ ID NO: 418 - DNA, 2187 bp, Adeno-associated virus
atggctgccgatggttatcttccagattggctcgaggacaacctctctgagggcattcgcgagtggtgggacttgaaacctggagccccgaaacccaaagccaaccagcaaaagcaggacgacggccggggtctggtgcttcctggctacaagtacctcggacccttcaacggactcgacaagggagagccggtcaacgaggcagacgccgcggccctcgagcacgacaaggcctacgacaagcagctcgagcagggggacaacccgtacctcaagtacaaccacgccgacgccgagtttcaggagcgtcttcaagaagatacgtcttttgggggcaacctcgggcgagcagtcttccaggccaagaagcgggttctcgaacctctcggtctggttgaggaaggcgctaagacggctcctggaaagaagagacccatagaatcccccgactcctccacgggcatcggcaagaaaggccagcagcccgctaaaaagaagctcaactttgggcagactggcgactcagagtcagtgcccgacccccaacctctcggagaacctcccgccgcgccctcaggtctgggatctggtacaatggctgcaggcggtggcgcaccaatggcagacaataacgaaggcgccgacggagtgggtaatgcctccggaaattggcattgcgattccacatggctgggcgacagagtcatcaccaccagcacccgcacctgggccctgcccacctacaacaaccacctctacaagcagatatcaagtcagagcggggctaccaacgacaaccacttcttcggctacagcaccccctggggctattttgacttcaacagattccactgccacttctcaccacgtgactggcagcgactcatcaacaacaactggggattccggcccagaaagctgcggttcaagttgttcaacatccaggtcaaggaggtcacgacgaacgacggcgttacgaccatcgctaataaccttaccagcacgattcaggtcttctcggactcggagtaccaactgccgtacgtcctcggctctgcgcaccagggctgcctccctccgttccctgcggacgtgttcatgattcctcagtacggatatctgactctaaacaacggcagtcagtctgtgggacgttcctccttctactgcctggagtactttccttctcagatgctgagaacgggcaataactttgaattcagctacacctttgaggaagtgcctttccacagcagctatgcgcacagccagagcctggaccggctgatgaatcccctcatcgaccagtacctgtactacctggcccggacccagagcactacggggtccacaagggagctgcagttccatcaggctgggcccaacaccatggccgagcaatcaaagaactggctgcccggaccctgttatcggcagcagagactgtcaaaaaacatagacagcaacaacaacagtaactttgcctggaccggggccactaaataccatctgaatggtagaaattcattaaccaacccgggcgtagccatggccaccaacaaggacgacgaggaccagttctttcccatcaacggagtgctggtttttggcgaaacgggggctgccaacaagacaacgctggaaaacgtgctaatgaccagcgaggaggagatcaaaaccaccaatcccgtggctacagaagaatacggtgtggtctccagcaacctgcaatcgtctacggccggaccccagacacagactgtcaacagccagggggctctgcccggcatggtctggcagaaccgggacgtgtacctgcagggtcccatctgggccaaaattcctcacacggacggcaactttcacccgtctcccctgatgggcggatttggactcaaacacccgcctcctcaaattctcatcaaaaacaccccggtacctgctaatcctccagaggtgtttactcctgccaagtttgcctcatttatcacgcagtacagcaccggccaggtcagcgtggagatcgagtgggaactgcagaaagaaaacagcaaacgctggaatccagagattcagtacacctcaaattatgccaagtctaataatgtggaatttgctgtcaacaacgaaggggtttatactgagcctcgccccattggcacccgttacctcacccgtaacctgtaa

SEQ ID NO: 419 - protein, 728 aa, Adeno-associated virus; identical to SEQ ID NO: 87

SEQ ID NO: 420 - protein, 728 aa, Adeno-associated virus; identical to SEQ ID NO: 179

SEQ ID NO: 421 - protein, 728 aa, Adeno-associated virus; identical to SEQ ID NO: 179

SEQ ID NO: 422 - protein, 733 aa, Adeno-associated virus
MAADGHLPDWLEDNLSEGIREWWDLKPGAPKPKANQQKQDDGRGLVLPGYKYLGPFNGLDKGEPVNAADAAALEHDKAYDQQLKAGDNPYLRYNHADAEFQERLQEDTSFGGNLGRAVFQAKKRVLEPLGLVEEGAKTAPGKKRPIESPDSSTGIGKKGQQPAKKKLNFGQTGDSESVPDPQPIGEPPAGPSGLGSGTMAAGGGAPMADNNEGADGVGSSSGNWHCDSTWLGDRVITTSTRTWALPTYNNHLYKQISNGTSGGSTNDNTYFGYSTPWGYFDFNRFHCHFSPRDWQRLINNSWGFRPKRLNFKLFNIQVKEVTQNEGTKTIANNLTSTIQVFTDSEYQLPYVLGSAHQGCLPPFPADVFMIPQYGYLTLNNGSQAVGRSSFYCLEYFPSQMLRTGNNFEFSYQFEDVPFHSSYAHSQSLDRLMNPLIDQYLYYLSRTQSTGGTAGTQQLLFSQAGPNNMSAQAKNWLPGPCYRQQRVSTTLSQNNNSNFAWTGATKYHLNGRDSLVNPGVAMATHKDDEERFFPSSGVLMFGKQGAGKDNVDYSSVMLTSEEEIKTTNPVATEQYGVVADNLQQQNAAPIVGAVNSQGALPGMVWQNRDVYLQGPIWAKIPHTDGNFHPSPLMGGFGLKHPPPQILIKNTPVPADPPTTFSQAKLASFITQYSTGQVSVEIEWELQKENSKRWNPEIQYTSNYYKSTNVDFAVNTEGTYSEPRPIGTRYLTRNL

SEQ ID NO: 423 - DNA, 3113 bp, Adeno-associated virus
gaattcgccctttctacggctgcgtcaactggaccaatgagaactttcccttcaacgattgcgtcgacaagatggtgatctggtgggaggagggcaagatgacggccaaggtcgtggagtccgccaaggccattctcggcggcagcaaggtgcgcgtggaccaaaagtgcaagtcgtccgcccagatcgatcccacccccgtgatcgtcacttccaacaccaacatgtgcgccgtgattgacgggaacagcaccaccttcgagcaccagcagccgttacaagaccggatgttcaaatttgaactcacccgccgtctggagcatgactttggcaaggtgacaaagcaggaagtcaaagagttcttccgctgggcgcaggatcacgtgaccgaggtggcgcatgagttctacgtcagaaagggtggagccaacaagagacccgcccccgatgacgcggataaaagcgagcccaagcgggcctgcccctcagtcgcggatccatcgacgtcagacgcggaaggagctccggtggactttgccgacaggtaccaaaacaaatgttctcgtcacgcgggcatgcttcagatgctgcttccctgcaagacatgcgagagaatgaatcagaatttcagcatttgcttcacgcacgggaccagagactgttcagaatgtttccccggcgtgtcagaatctcaaccggtcgtcagaaagaggacgtatcggaaactctgtgccattcatcatctgctggggcgggctcccgagattgcttgctcggcctgcgatctggtcaacgtggacctggatgactgtgtttctgagcaataaatgacttaaaccaggtatggctgccgatggtcatcttccagattggctcgaggacaacctctctgagggcattcgcgagtggtgggacttgaaacctggagccccgaaacccaaagccaaccagcaaaagcaggacgacggccggggtctggtgcttcctggctacaagtacctcggacccttcaacggactcgacaagggggagcccgtcaacgcggcggacgcagcggccctcgagcacgacaaggcctacgaccagcagctcaaagcgggtgacaatccgtacctgcggtataaccacgccgacgccgagtttcaggagcgtcttcaagaagatacgtcttttgggggcaacctcgggcgagcagtcttccaggccaagaagcgggttctcgaacctctcggtctggttgaggaaggcgctaagacggctcctggaaagaagagacccatagaatcccccgactcctccacgggcatcggcaagaaaggccagcagcccgctaaaaagaagctcaactttgggcagactggcgactcagagtcagtgcccgaccctcaaccaatcggagaaccccccgcaggcccctctggtctgggatctggtacaatggctgcaggcggtggcgctccaatggcagacaataacgaaggcgccgacggagtgggtagttcctcaggaaattggcattgcgattccacatagctgggcgacagagtcatcaccaccagcacccgaacctgggccctccccacctacaacaaccacctctacaagcaaatctccaacgggacatcgggaggaagcaccaacgacaacacctacttcggctacagcaccccctgggggtattttgactttaacagattccactgccacttctcaccacgtgactggcagcgactcatcaacaacagctggggattccggcccaagagactcaacttcaagctcttcaacatccaggtcaaggaggtcacgcagaatgaaggcaccaagaccatcgccaataaccttaccagcacgattcaggtctttacggactcggaataccagctcccgtacgtcctcggctctgcgcaccagggctgcctgcctccgttcccggcggacgtcttcatgattcctcagtacgggtacctgactctgaacaacggcagtcaggccgtgggccgttcctccttctactgcctggagtactttccttctcaaatgctgagaacgggcaacaactttgagttcagctaccagtttgaggacgtgccttttcacagcagctacgcgcacagccaaagcctggaccggctgatgaaccccctcatcgaccagtacctgtactacctgtctcggactcagtccacgggaggtaccgcaggaactcagcagttgctattttctcaggccgggcctaataacatgtcggctcaggccaaaaactggctacccgggccctgctaccggcagcaacgcgtctccacgacactgtcgcaaaataacaacagcaactttgcttggaccggtgccaccaagtatcatctgaatggcagagactctctggtaaatcccggtgtcgctatggcaacgcacaaggacgacgaagagcgattttttccatccagcggagtcttgatgtttgggaaacagggagctggaaaagacaacgtggactatagcagcgttatgctaaccagtgaggaagaaatcaaaaccaccaacccagtggccacagaacagtacggcgtggtggccgataacctgcaacagcaaaacgccgctcctattgtaggggccgtcaacagtcaaggagccttacctggcatggtctggcagaaccgggacgtgtacctgcagggtcctatctgggccaagattcctcacacggacggcaactttcatccttcgccgctgatgggaggctttggactgaaacacccgcctcctcagatcctgattaagaatacacctgttcccgcggatcctccaactaccttcagtcaagccaagctggcgtcgttcatcacgcagtacagcaccggacaggtcagcgtggaaattgaatgggagctgcagaaagagaacagcaagcgctggaacccagagattcagtatacttccaactactacaaatctacaaatgtggactttgctgtcaatactgagggtacttattcagagcctcgccccattggcacccgttacctcacccgtaacctgtaattgcctgttaatcaataaaccggttaattcgtttcagttgaactttggtctctgcgaagggcgaattc

SEQ ID NO: 424 - protein, 731 aa, Adeno-associated virus
MAADGYLPDWLEDNLSEGIREWWDLKPGAPKPKANQQKQDDGRGLVLPGYKYLGPFNGLDKGEPVNEADAAALEHDKAYDKQLEQGDNPYLKYNHADAEFQERLQEDTSFGGNLGRAVFRAKKRVLEPLGLVEEGAKTAPGKKRPIESPDSSTGIGKKGQQPAKKKLNFGQTGDSESVPDPQPLGEPPAAPSGLGSGTMAAGGGAPMADNNEGADGVGNASGNWHCDSTWLGDRVITTSTRTWALPTYNNHLYKQISSQSGATNDNHFFGYSTPWGYFDFNRFHCHFSPRDWQRLINNNRGFRPRKLRFKLFNIQVKEVTTNDGVTTIANNLTSTIQVFSDSEYQLPYVLGSAHQGCLPPFPADVFMIPQYGYLTLNNGSQSVGRSSFYCLEYFPSQMLRTGNNFEFSYQFEDVPFHSSYAHSQSLDRLMNPLIDQYLYYLSRTQSTGGTAGTQQLLFSQAGPNNMSAQAKNWLPGPCYRQQRVSTTLSQNNNSNFAWTGATKYHLNGRDSLVNPGVAMATHKDDEERFFPSSGVLMFGKQGAGKDNVDYSSVMLTSEEEIKTTNPVATEQYGVVADNLQQQNAAPIVGAVNSQGALPGMAWQNRDVYLQGPIWAKIPHTDGNFHPSPLMGGFGLKHPPPQILIKNTPVPADPPTTFSQAKLASFITQYSTGQVSVEIEWELQKENSKRWNPEIQYTSNYYKSTNVDFAVNTEGTYSEPRPIGTRYLTRNL

SEQ ID NO: 425 - DNA, 3106 bp, Adeno-associated virus
gaattcgcccttctacggctgcgtcaactggaccaatgagaactttcccttcaacgattgcgtcgacaagatggtgatctggtgggaggagggcaagatgacggccaaggtcgtggagtccgccaaggccattctcggcggcagcaaggtgcgcgtggaccaaaagtgcaagtcgtccgcccagatcgaccccacccccgtgatcgtcacctccaacaccaacatgtgcgccgtgattgacgggaacagcaccaccttcgagcaccagcagccgttgcaggaccggatgttcaaatttgaactcacccgccgtctggagcatgactttggcaaggcgacaaagcaggaagtcaaagagttcttccgctgggcgcaggatcacgtgaccgaggtggcgcatgagttctacgtcagaaagggtggagccaacaagagacccgcccccgatgacgcggataaaagcgagcccaagcgggcccgcccctcagtcgcggatccatcgacgtcagacgcggaaggagctccggtggactttgccgacaggtaccaaaacaaatgttctcgtcacgcgggcatgcttcagatgctgtttccctgcaaaacatgcgagagaatgaatcagaatttcaacatttgcttcacgcacgggaccagagactgttcagaatgtttccccggcgtgtcagaatctcaaccggtcgtcagaaagaggacgtatcggaaactctgtgccattcatcatctgctggggcgggctcccgagattgcttgctcggcctgcgatctggtcaacgtggacctggatgactgtgtttctgagcaataaatgacttaaaccaggtatggctgccgatggttatcttccagattggctcgaggacaacctctctgagggcattcgcgagtggtgggacttgaaacctggagccccgaaacccaaagccaaccagcaaaagcaggacgacggccggggtctggtgcttcctggctacaagtacctcggacccttcaacggactcgacaagggagagccggtcaacgaggcagacgccgcggccctcgagcacgacaaggcctacgacaagcagctcgagcagggggacaacccgtacctcaagtacaaccacgccgacgccgagtttcaggagcgtcttcaagaagatacgtcttttgggggcaacctcgggcgagcagtcttccgggccaagaagcgggttctcgaacctctcggtctggttgaggaaggcgctaagacggctcctggaaagaagagacccatagaatcccccgactcctccacgggcatcggcaagaaaggccagcagcccgctaaaaagaagctcaactttgggcagactggcgactcagagtcagtgcccgacccccaacctctcggagaacctcccgccgcgccctcaggtctgggatctggtacaatggctgcaggcggtggcgcaccaatggcagacaataacgaaggcgccgacggagtgggtaatgcctccggaaattggcattgcgattccacatggctgggcgacagagtcatcaccaccagcacccgcacctgggccctgcccacctacaacaaccacctctacaagcagatatcaagtcagagcggggctaccaacgacaaccacttcttcggctacagcaccccctggggctattttgacttcaacagattccactgccacttctcaccacgtgactggcagcgactcatcaacaacaaccggggattccggcccagaaagctgcggttcaagttgttcaacatccaggtcaaggaggtcacgacgaacgacggcgttacgaccatcgctaataaccttaccagcacgattcaggtcttctcggactcggagtaccaactgccgtacgtcctcggctctgcgcaccagggctgcctccctccgttccctgcggacgtgttcatgattcctcagtacggatatctgactctaaacaacggcagtcagtctgtgggacgttcctccttctactgcctggagtactttccttctcagatgctgagaacgggcaataactttgaattcagctaccagtttgaggacgtgccctttcacagcagctacgcgcacagccaaagcctggaccggctgatgaaccccctcatcgaccagtacctgtactacctgtctcggactcagtccacgggaggtaccgcaggaactcagcagttgctattttctcaggccgggcctaataacatgtcggctcaggccaaaaactggctacccgggccctgctaccggcagcaacgcgtctccacgacactgtcgcaaaataacaacagcaactttgcttggaccggtgccaccaagtatcatctgaatggcagagactctctggtaaatcccggtgtcgctatggcaacgcacaaggacgacgaagagcgattttttccatccagcggagtcttgatgtttgggaaacagggagctggaaaagacaacgtggactatagcagcgttatgctaaccagtgaggaagaaatcaaaaccaccaacccagtggccacagaacagtacggcgtggtggccgataacctgcaacagcaaaacgccgctcctattgtaggggccgtcaacagtcaaggagccttacctggcatggcctggcagaaccgggacgtgtacctgcagggtcctatctgggccaagattcctcacacggacggcaactttcatccttcgccgctgatgggaggctttggactgaaacacccgcctcctcagatcctgattaagaatacacctgttcccgcggatcctccaactaccttcagtcaagccaagctggcgtcgttcatcacgcagtacagcaccggacaggtcagcgtggaaattgaatgggagctgcagaaagagaacagcaagcgctggaacccagagattcagtatacttccaactactacaaatctacaaatgtggactttgctgtcaatactgagggtacttattcagagcctcgccccattggcacccgttacctcacccgtaacctgtaattgcctgttaatcaataaaccggttaattcgtttcagttgaactttggtctctgcgaagggcgaattc

SEQ ID NO: 426 - protein, 738 aa, Adeno-associated virus
MAADGYLPDWLEDNLSEGIREWWDLKPGAPKPKANQQKQDDGRGLVLPGYKYLGPFNGLDKGEPVNEADAAALEHDKAYDKQLEQGDNPYLKYNHADAEFQERLQEDTSFGGNLGRAVFQAKKRVLEPLGLVEEGAKTAPGKKRPVEPSPQRSPDSSTGIGKTGQQPAKKRLNFGQTGDSESVPDPQPIGEPPAGPSGLGSGTMAAGGGAPMADNNEGADGVGSSSGNWHCDSTWLGDRVITTSTRTWALPTYNNHLYKQISNGTSGGSTNDNTYFGYSTPWGYFDFNRFHCHFSPRDWQRLINNNWGFRPKRLNFKLFNIQVKEVTQNEGTKTIANNLTSTIQVFTDSEYQLPYVLGSAHQGCLPPFPADVFMIPQYGYLTLNNGSQAVGRSSFYCLEYFPSQMLRTGNNFEFSYQFEDVPFHSSYAHSQSLDRLMNPLIDQYLYYLSRTQSTGGTAGTQQLLFSQAGPNNMSAQAKNWLPGPCYRQQRVSTTLSQNNNSNFAWTGATKYHLNGRDSLVNPGVAMATHKDDEERFFPSSGVLMFGKQGAGKDNVDYSSVMLTSEEEIKTTNPVATEQYGVVADNLQQQNAAPIVGAVNSQGALPGMVWQNRDVYLQGPIWAKIPHTDGNFHPSPLMGGFGLKHPPPQILIKNTPVPADPPTTFSQAKLASFITQYSTGQVSVEIEWELQKENSKRWNPEIQYTSNYYKSTNVDFAVNTEGTYSEPRPIGTRYLTRNL

SEQ ID NO: 427 - DNA, 3197 bp, Adeno-associated virus
gaattcgccctttctacggctgcgtcaactggaccaatgagaactttcccttcaacgattgcgtcgacaagatggtgatctggtgggaggagggcaagatgacggccaaggtcgtggagtccgccaaggccattctcggcggcagcaaggtgcgcgtggaccaaaagtgcaagtcgtccgcccagatcgaccccacccccgtgatcgtcacctccaacaccaacatgtgcgccgtgattgacgggaacagcaccaccttcgagcaccagcagccgttacaagaccggatgttcaaatttgaactcacccgccgtctggagcacgactttggcaaggtgacaaagcaggaagtcaaagagttcttccgctgggcgcaggatcacgtgaccgaggtggcgcatgagttctacgtcagaaagggtggagccaacaagagacccgcccccgatgacgcggataaaagcgagcccaagcgggcctgcccctcagtcgcggatccatcgacgtcagacgcggaaggagctccggtggactttgccgacaggtaccaaaacaaatgttctcgtcacgcgggcatgcttcagatgctgtttccctgcaagacatgcgagagaatgaatcagaatttcaacatttgcttcacgcacgggaccagagactgttcagaatgtttccccggcgtgtcagaatctcaaccggtcgtcagaaagaggacgtatcggaaactctgtgccattcatcatctgctggggcgggctcccgagattgcttgctcggcctgcgatctggtcaacgtggacctggatgactgtgtttctgagcaataaatgacttaaaccaggtatggctgccgatggttatcttccagattggctcgaggacaacctctctgagggcattcgcgagtggtgggacttgaaacctggagccccgaaacccaaagccaaccagcaaaagcaggacgacggccggggtctggtgcttcctggctacaagtacctcggacccttcaacggactcgacaagggagagccggtcaacgaggcagacgccgcggccctcgagcacgacaaggcctacgacaagcagctcgagcagggggacaacccgtacctcaagtacaaccacgccgacgccgagtttcaggagcgtcttcaagaagatacgtcttttgggggcaacctcgggcgagcagtcttccaggccaagaagcgggttctcgaacctctcggtctggttgaggaaggcgctaagacggctcctggaaagaagagaccggtagagccatcaccccagcgttctccagactcctctacgggcatcggcaagacaggccagcagcccgcgaaaaagagactcaactttgggcagactggcgactcagagtcagtgcccgaccctcaaccaatcggagaaccccccgcaggcccctctggtctgggatctggtacaatggctgcaggcggtggcgctccaatggcagacaataacgaaggcgccgacggagtgggtagttcctcaggaaattggcattgcgattccacatggctgggcgacagagtcatcaccaccagcacccgaacctgggccctccccacctacaacaaccacctctacaagcaaatctccaacgggacatcgggaggaagcaccaacgacaacacctacttcggctacagcaccccctgggggtattttgactttaacagattccactgccacttctcaccacgtgactggcagcgactcatcaacaacaactggggattccggcccaagagactcaacttcaagctcttcaacatccaggtcaaggaggtcacgcagaatgaaggcaccaagaccatcgccaataaccttaccagcacgattcaggtctttacggactcggaataccagctcccgtacgtcctcggctctgcgcaccagggctgcctgcctccgttcccggcggacgtcttcatgattcctcagtacgggtacctgactctgaacaacggcagtcaggccgtgggccgttcctccttctactgcctggagtactttccttctcaaatgctgagaacgggcaacaactttgagttcagctaccagtttgaggacgtgccttttcacagcagctacgcgcacagccaaagcctggaccggctgatgaaccccctcatcgaccagtacctgtactacctgtctcggactcagtccacgggaggtaccgcaggaactcagcagttgctattttctcaggccgggcctaataacatgtcggctcaggccaaaaactggctacccgggccctgctaccggcagcaacgcgtctccacgacactgtcgcaaaataacaacagcaactttgcttggaccggtgccaccaagtatcatctgaatggcagagactctctggtaaatcccggtgtcgctatggcaacgcacaaggacgacgaagagcgattttttccatccagcggagtcttgatgtttgggaaacagggagctggaaaagacaacgtggactatagcagcgttatgctaaccagtgaggaagaaatcaaaaccaccaacccagtggccacagaacagtacggcgtggtggccgataacctgcaacagcaaaacgccgctcctattgtaggggccgtcaacagtcaaggagccttacctggcatggtctggcagaaccgggacgtgtacctgcagggtcctatctgggccaagattcctcacacggacggcaactttcatccttcgccgctgatgggaggctttggactgaaacacccgcctcctcagatcctgattaagaatacacctgttcccgcggatcctccaactaccttcagtcaagccaagctggcgtcgttcatcacgcagtacagcaccggacaggtcagcgtggaaattgaatgggagctgcagaaagagaacagcaagcgctggaacccagagattcagtatacttccaactactacaaatctacaaatgtggactttgctgtcaatactgagggtacttattcagagcctcgccccattggcacccgttacctcacccgtaacctgtaattgcctgttaatcaataaaccggttaattcgtttcagttgaactttggtctctgcgaagggcgaattcgtttaaacctgcaggactagtccctttagtgagggttaattctgagcttggcgtaatcatgggtcatag

SEQ ID NO: 428 - protein, 735 aa, Adeno-associated virus
MAADGYLPDWLEDNLSEGIREWWDLKPGAPKPKANQQKQDDGRGLVLPGYKYLGPFNGLDKGEPVNEADAAALEHDKAYDKQLEQGDNPYLKYNHADAEFQERLQEDTSFGGNLGRAVFQAKKRVLEPLGLVEEGAKTAPGKKRPVEPSPQRSPDSSTGIGKTGQQPAKKRLNFGQTGDSESVPDPQPIGEPPAGPSGLGSGTMAAGGGAPMADNNEGADGVGSSSGNWHCDSTWLGDRVITTSTRTWALPTYNNHLYKQISNGTSGGSTNDNTYFGYSTPWGYFDFNRFHCHFSPRDWQRLINNNWGFRPRKLRFKLFNIQVKEVTTDDGVTTIANNLTSTIQVFSDSEYQLPYVLGSAHQGCLPPFPADVFMIPQYGYLTLNNGSQSVGRSSFYCLEYFPSQMLRTGNNFEFSYTFEEVPFHSSYAHSQSLDRLMNPLIDQYLYYLARTQSTTGSTRELQFHQAGPNTMAEQSKNWLPGPCYRQQRLSKNIDSNNNSNFAWTGATKYHLNGRNSLTNPGVAMATNKDDEDQFFPINGVLVFGKTGAANKTTLENVLMTSEEEIKTTNPVATEEYGVVSSNLQSSTAGPQTQTVNSQGALPGMVWQNRDVYLQGPIWAKIPHTDGNFHPSPLMDGFGLKHPPPQILIKNTPVPANPPEVFTPAKFASFITQYSTGQVSVEIEWELQKENSKRWNPEIQYTSNYAKSNNVEFAVNNEGVYTEPRPIGTRYLTRNL

SEQ ID NO: 429 - DNA, 3276 bp, Adeno-associated virus
gaattcgcccttcgcagagaccaaagttcaactgaaacgaattaaccggtttattgattaacaggcaattacaggttacgggtgaggtaacgggtgccaatggggcgaggctcagtataaaccccttcgttgttgacagcaaattccacattattagacttggcataatttgaggtgtactgaatctctggattccagcgtttgctgttttctttctgcagttcccactcgatctccacgctgacctggccggtgctgtactgcgtgataaatgaggcaaacttggcaggagtaaacacctctggaggattagcaggtaccggggtgtttttgatgagaatttgaggaggcgggtgtttgagtccaaatccgtccatcaggggagacgggtgaaagttgccgtccgtgtgaggaattttggcccagatgggaccctgcaggtacacgtcccggttctgccagaccatgccgggcagagccccctggctgttgacagtctgtgtctggggtccggccgtagacgattgcaggttgctggagaccacaccgtattcttctgtagccacgggattggtggttttgatctcctcctcgctggtcattagcacgttttccagcgttgtcttgttggcagcccccgttttgccaaaaaccagcactccgttgatgggaaagaactggtcctcgtcgtccttgttggtggccatggctacgcccgggttggttaatgaatttctaccattcagatggtatttagtggccccggtccaggcaaagttactgttgttgttgctgtctatgttttttgacagtctctgctgccgataacagggtccgggcagccagttctttgattgctcggccatggtgttgggcccagcctgatggaactgcagctcccttgtggaccccgtagtgctctgggtccgggccaggtagtacaggtactggtcgatgaggggattcatcagccggtccaggctctggctatgcgcatagctgctgtggaaaggcacttcctcaaaggtgtagctgaattcaaagttattgcccgttctcagcatctgagaaggaaagtactccaggcagtagaaggaggaacgtcccacagactgactgccgttgtttagagtcagatatccgtactgaggaatcatgaacacgtccgcagggaacggagggaggcagccctggtgcgcagagccgaggacgtacggcagttggtactccgagtccgagaagacctgaatcgtgctggtaaggttattagcgatggtcgtaacgccgtcgtccgtcgtgacctccttgacctggatgttgaacaacttgaaccgcagctttctgggccggaatccccagttgttgttgatgagtcgctgccagtcacgtggtgagaagtggcagtggaatctgttaaagtcaaaatacccccagggggtgctgtagccgaagtaggtgttgtcgttggtgcttcctcccgatgtcccgttggagatttgcttgtagaggtggttgttgtaggtggggagggcccaggttcgggtgctggtggtgatgactctgtcgcccagccatgtggaatcgcaatgccaatttcctgaggaactacccactccgtcggcgccttcgttattgtctgccattggagcgccaccgcctgcagccattgtaccagatcccagaccagaggggcctgcggggggttctccgattggttgagggtcgggcactgactctgagtcgccagtctgcccaaagttgagtctctttttcgcgggctgctggcctgtcttgccgatgcccgtagaggagtctggagaacgctggggtgatggctctaccggtctcttctttccaggagccgtcttagcgccttcctcaaccagaccgagaggttcgagaacccgcttcttggcctggaagactgctcgcccgaggttgcccccaaaagacgtatcttcttgaagacgctcctgaaactcggcgtcggcgtggttgtacttgaggtacgggttgtccccctgctcgagctgcttgtcgtaggccttgtcgtgctcgagggccgcggcgtctgcctcgttgaccggctctcccttgtcgagtccgttgaagggtccgaggtacttgtagccaggaagcaccagaccccggccgtcgtcctgcttttgctggttggctttgggtttcggggctccaggtttcaagtcccaccactcgcgaatgccctcagagaggttgtcctcgagccaatctggaagataaccatcggcagccatacctggtttaagtcatttattgctcagaaacacagtcatccaggtccacgttgaccagatcgcaggccgagcaagcaatctcgggagcccgccccagcagatgatgaatggcacagagtttccgatacgtcctctttctgacgaccggttgagattctgacacgccggggaaacattctgaacagtctctggtcccgtgcgtgaagcaaatgttgaaattctgattcattctctcgcatgtcttgcagggaaacagcatctgaagcatgcccgcgtgacgagaacacttgttttggtacctgtcggcaaagtccaccggagctccttccgcgtctgacgtcgatggatgcaaaatgtcgcaaaagcactcacgtgacagctaatacaggaccactcccctatgacgtgatttacgtcagcgctatgcccgcgtgacgagaacatttgttttggtacctgtcggcaaagtccaccggagctccttccgcgtctgacgtcgatggatccgcgactgaggggcaggcccgcttgggctcgcttttatccgcgtcatcgggggcgggtctcttgttggctccaccctttctgacgtagaactcatgcgccacctcggtcacgtgatcctgcgcccagcggaagaactctttgacttcctgctttgtcaccttgccaaagtcatgctccagacggcgggtgagttcaaatttgaacatccggtcctgcaacggctgctggtgctcgaaggtggtgctgttcccgtcaatcacggcgcacatgttggtgttggaagtgacgatcacgggggtgggatcgatctgggcggaagacttgcacttttggtccacgcgcaccttgctgccgccgagaatggccttggcggactccacgaccttggccgtcatcttgccctcctcccaccagatcaccatcttgtcgacgcaatcgttgaagggaaagttctcattggtccagttgacgcagccgtagaaagggcgaattc

SEQ ID NO: 430 - protein, 738 aa, Adeno-associated virus; identical to SEQ ID NO: 95

SEQ ID NO: 431 - protein, 738 aa, Adeno-associated virus
MAADGYLPDWLEDNLSEGIREWWDLKPGAPKPKANQQKQDDGRGLVLPGYKYLGPFNGLDKGEPVNAADAAALEHDKAYDQQLKAGDNPYLRYNHADAEFQERLQEDTSFGGNLGRAVFQAKKRVLEPLGLVEEGAKTAPGKKRPVEPSPQRSPDSSTGIGKKGHQPARKRLNFGQTGDSESVPDPQPIGEPPAGPSGLGSGTMAAGGGAPMADNNEGADGVGSSSGNWHCDSTWLGDRVITTSTRTWALPTYNNHLYKQISNGTSGGSTNDNTYFGYSTPWGYFDFNRFHCHFSPRDWQRLINNNWGFRPKRLNFKLFNIQVKEVTQNEGTKTIANNLTSTIQVFTDSEYQLPYVPGSAHQGCLPPFPADVFMIPQYGYLTLNNGSQAVGRSSFYCLEYFPSQMLRTGNNFEFSYTFEDVPFHSSYAHSQSLDRLMNPLIDQYLYYLSRTQSTGGTQGTQQLLFSQAGPANMSAQAKNWLPGPCYRQQRVSTTLSQNNNSNFAWTGATKYHLNGRDSLVNPGVAMATHKDDEERFFPSSGVLMFGKQGAGKDNVDYSSVMLTSEEEIKTTNPVATEQYGVVADNLQQTNGAPIVGTVNSQGALPGMVWQNRDVYLQGPIWAKIPHTDGNFHPSPLMGGFGLKHPPPQILIKNTPVPADPPTTFSQAKLASFITQYSTGQVSVEIEWELQKENSKRWNPEIQYTSNYYKSTNVDFAVNTEGTYSEPRPIGTRYLTRNL

SEQ ID NO: 432 - protein, 738 aa, Adeno-associated virus; identical to SEQ ID NO: 93

SEQ ID NO: 433 - protein, 728 aa, Adeno-associated virus
MAADGYLPDWLEDNLSEGIREWWDLKPGAPKPKANQQKQDDGRGLVLPGYKYLGPFNGLDKGEPVNEADAAALEHDKAYDKQLEQGDNPYLKYNHADAEFQERLQEDTSFGGNLGRAVFQAKKRVLEPLGLVEEGAKTAPGKKRPIESPDSSTGIGRKGQQPAKKKLNFGQTGDSESVPDPQPIGEPPAGPSGLGSGTMAAGGGAPMADNNEGADGVGNASGNWHCDSTWLGDRVITTSTRTWALPTYNNHLYKQISSQSGATNDNHFFGYSTPWGYFDFNRFHCHFSPRDWQRLINNNWGFRPRKLRFKLFNIQVKEVTTNDGVTTIANNLTSTIQVFSDSEYQLPYVLGSAHQGCLPPFPADVFMIPQYGYLTLNNGSQSVGRSSFYCLEYFPSQMLRTGNNFEFSYTFEEVPFHSSYAHSQSLDRLMNPLIDQYLYYLARTQSTTGSTRELQFHQAGPNTMAEQSKNWLPGPCYRQQRLSKNIDSNNNSNFAWTGATKYHLNGRNSLTNPGVAMATNKDDEDQFFPINGVLVFGKTGAANKTTLENVLMTSEEEIKTTNPVATEEYGVVSSNLQSSTAGPQTQTVNSQGALPGMVWQNRDVYLQGPIWAKIPHTDGNFHPSPLMGGFGLKHPPPQILIKNTPVPANPPEVFTPAKFASFITQYSTGQVSVEIEWELQKENSKRWNPEIQYTSNYAKSNNVEFAVNNEGVYTEPRPIGTRYLTRNL

SEQ ID NO: 434 - DNA, 2489 bp, Adeno-associated virus
gaattcgccctttctacggctgcgtcaactggaccaatgagaactttcccttcaacgattgcgtcgacaagatggtgatctggtgggaggagggcaagatgacggccaaggtcgtgaagtccgccaaggccattcatcatctgctggggcgggctcccgagattgcttgctcggcctgcgatctggtcaacgtggacctggatgactgtgtttctgagcaataaatgacttaaaccaggtatggctgccgatggttatcttccagattggctcgaggacaacctctctgagggcattcgcgagtggtgggacttgaaacctggagccccgaaacccaaagccaaccagcaaaagcaggacgacggccggggtctggtgcttcctggctacaagtacctcggacccttcaacggactcgacaagggagagccggtcaacgaggcagacgccgcggccctcgagcacgacaaggcctacgacaagcagctcgagcagggggacaacccgtacctcaagtacaaccacgccgacgccgagtttcaggagcgtcttcaagaagatacgtcttttgggggcaacctcgggcgagcagtcttccaggccaagaagcgggttctcgaacctctcggtctggttgaggaaggcgctaagacggctcctggaaagaagagacccatagaatcccccgactcctccacgggcatcggcaggaaaggccagcagcccgctaaaaagaagctcaactttgggcagactggcgactcagagtcagtgcccgaccctcaaccaatcggagaaccccccgcaggcccctctggtctgggatctggtacaatggctgcaggcggtggcgctccaatggcagacaataacgaaggcgccgacggagtgggtaatgcctccggaaattggcattgcgattccacatggctgggcgacagagtcatcaccaccagcacccgcacctgggccctgcccacctacaacaaccacctctacaagcagatatcaagtcagagcggggctaccaacgacaaccacttcttcggctacagcaccccctggggctattttgacttcaacagattccactgccacttctcaccacgtgactggcagcgactcatcaacaacaactggggattccggcccagaaagctgcggttcaagttgttcaacatccaggtcaaggaggtcacgacgaacgacggcgttacgaccatcgccaataaccttaccagcacgattcaggtcttctcggactcggagtaccaactgccgtacgtcctcggctctgcgcaccagggctgcctccctccgttccctgcggacgtgttcatgattcctcagtacggatatctgactctaaacaacggcagtcagtctgtgggacgttcctccttctactgcctggagtactttccttctcagatgctgagaacgggcaataactttgaattcagctacacctttgaggaagtgcctttccacagcagctatgcgcacagccagagcctggaccggctgatgaatcccctcatcgaccagtacctgtactacctggcccggacccagagcactacggggtccacaagggagctgcagttccatcaggctgggcccaacaccatggccgagcaatcaaagaactggctgcccggaccctgttatcggcagcagagactgtcaaaaaacatagacagcaacaacaacagtaactttgcctggaccggggccactaaataccatctgaatggtagaaattcattaaccaacccgggcgtagccatggccaccaacaaggacgacgaggaccagttctttcccatcaacggagtgctggtttttggcaaaacgggggctgccaacaagacaacgctggaaaacgtgctaatgaccagcgaggaggagatcaaaaccaccaatcccgtggctacagaagaatacggtgtggtctccagcaacctgcaatcgtctacggccggaccccagacacagactgtcaacagccagggggctctgcccggcatggtctggcagaaccgggacgtgtacctgcagggtcccatctgggccaaaattcctcacacggacggcaactttcacccgtctcccctgatgggcggatttggactcaaacacccgcctcctcaaattctcatcaaaaacaccccggtacctgctaatcctccagaggtgtttactcctgccaagtttgcctcatttatcacgcagtacagcaccggccaggtcagcgtggagatcgagtgggaactgcagaaagaaaacagcaaacgctggaatccagagattcagtacacctcaaattatgccaagtctaataatgtggaatttgctgtcaacaacgaaggggtttatactgagcctcgccccattggcacccgttacctcacccgtaacctgtaattgcctgttaatcaataaaccggttaattcgtttcagttgaactttggtcaagggcgaattc

SEQ ID NO: 435 - protein, 728 aa, Adeno-associated virus
MAADGYLPDWLEDNLSEGIREWWDLKPGAPKPKANQQKQDDGRGLVLPGYKYLGPFNGLDKGEPVNAADAAALEHDKAYDQQLKAGDNPYLRYNHADAEFQERLQEDTSFGGNLGRAVFQAKKRVLEPLGLVEEGAKTAPGKKRPIESPDSSTGIGKKGQQPAKKKLNFGQTGDSESVPDPQPIGEPPAGPSGLGSGTMAAGGGAPMADNNEGADGVGNASGNWHCDSTWLGDRVITTSTRTWALPTYNNHLYKQISSQSGATNDNHFFGYSTPWGYFDFNRFHCHFSPRDWQRLINNNWGFRPRKLRFKLFNIQVKEVTTNDGVTTIANNLTSTIQVFSDSEYQLPYVLGSAHQGCLPPFPADVFMIPQYGYLTLNNGSQSVGRSSFYCLEYFPSQMLRTGNNFEFSYTFEEVPFHSSYAHSQSLDRLMNPLIDQYLYYLARTQSTTGSTRELQFHQAGPNTMAEQSKNWLPGPCYRRQRLSKDIDSNNNSNFAWTGATKYHLNGRNSLTNPGVAMATNKDDEDQFFPINGVLVFGKTGAANKTTLENVLMTSEEEIKTTNPVATEEYGVVSSNLQSSTAGPQTQTVNSQGALPGMVWQNRDVYLQGPIWAKIPHTDGNFHPSPLMGGFGLKHPPPQILIKNTPVPANPPEVFTPAKFASFITQYSTGQVSVEIEWELQKENSKRWNPEIQYTSNYAKSNNVEFAVNNEGVYTEPRPIGTRYLTRNL

SEQ ID NO: 436 - DNA, 3098 bp, Adeno-associated virus
gaattcgccctttctacggctgcgtcaactggaccaatgagaactttcccttcaacgattgcgtcgacaagatggtgatctggtgggaggagggcaagatgacggccaaggtcgtggagtccgccaaggccattctcggcggcagcaaggtgcgcgtggaccaaaagtgcaagtcttccgcccagatcgatcccacccccgtgatcgtcacttccaacaccaacatgtgcgccgtgattgacgggaacagcaccaccttcgagcaccagcagccgttacaagaccggatgttcaaatttgaactcacccgccgtctggagcacgactttggcaaggtgacaaagcaggaagtcaaagagttcttccgctgggcgcaggatcacgtgaccgaggtggcgcatgagttctacgtcagaaagggtggagccaacaagagacccgcccccgatgacgcggataaaagcgagcccaagcgggcctgcccctcagtcgcggatccatcgacgtcagacgcggaaggagctccggtggactttgccgacaggtaccaaaacaaatgttctcgtcacgcgggcatgcttcagatgctgtttccctgcaagacatgcgagagaatgaatcagaatttcaacatttgcttcacgcacgggaccggagactgttcagaatgtttccccggcgtgtcagaatctcaaccggtcgtcagaaagaggacgtatcggaaactctgtgccattcatcatctgctggggcgggctcccgagattgcttgctcggcctgcgatctggtcaacgtggacctggatgactgtgtttctgagcaataaatgacttaaaccaggtatggctgccgatggttatcttccagattggctcgaggacaacctctctgagggcattcgcgagtggtgggacttgaaacctggagccccgaaacccaaagccaaccagcaaaagcaggacgacggccggggtctggtgcttcctggctacaagtacctcggacccttcaacggactcgacaagggagagccggtcaacgcggcggacgcagcggccctcgagcacgacaaggcctacgaccagcagctcaaagcgggtgacaatccgtacctgcggtataaccacgccgacgccgagtttcaggagcgtcttcaagaagatacgtcttttgggggcaacctcgggcgagcagtcttccaggccaagaagcgggttctcgaacctctcggtctggttgaggaaggcgctaagacggctcctggaaagaagagacccatagaatcccccgactcctccacgggcatcggcaagaaaggccagcagcccgctaaaaagaagctcaactttgggcagactggcgactcagagtcagtgcccgaccctcaaccaatcggagaaccccccgcaggcccctctggtctgggatctggtacaatggctgcaggcggtggcgctccaatggcagacaataacgaaggcgccgacggagtgggtaatgcctccggaaattggcattgcgattccacatggctgggcgacagagtcatcaccaccagcacccgcacctgggccctgcccacctacaacaaccacctctacaagcagatatcaagtcagagcggggctaccaacgacaaccacttcttcggctacagcaccccctggggctattttgacttcaacagattccactgccacttctcaccacgtgactggcagcgactcatcaacaacaactggggattccggcccagaaagctgcggttcaagttgttcaacatccaggtcaaggaggtcacgacgaacgacggcgttacgaccatcgctaataaccttaccagcacgattcaggtcttctcggactcggagtaccaactgccgtacgtcctcggctctgcgcaccagggctgcctccctccgttccctgcggacgtgttcatgattcctcagtacggatatctgactctaaacaacggcagtcagtctgtgggacgttcctccttctactgcctggagtactttccttctcagatgctgagaacgggcaataactttgaattcagctacacctttgaggaagtgcctttccacagcagctatgcgcacagccagagcctggaccggctgatgaatcccctcatcgaccagtacctgtactacctggcccggacccagagcactacggggtccacaagggagctgcagttccatcaggctgggcccaacaccatggccgagcaatcaaagaactggctgcccggaccctgttatcggcggcagagactgtcaaaagacatagacagcaacaacaacagtaactttgcctggaccggggccactaaataccatctgaatggtagaaattcattaaccaacccgggcgtagccatggccaccaacaaggacgacgaggaccagttctttcccatcaacggagtgctggtttttggcaaaacgggggctgccaacaagacaacgctggaaaacgtgctaatgaccagcgaggaggagatcaaaaccaccaatcccgtggctacagaagaatacggtgtggtctccagcaacctgcaatcgtctacggccggaccccagacacagactgtcaacagccagggggctctgcccggcatggtctggcagaaccgggacgtgtacctgcagggtcccatctgggccaaaattcctcacacggacggcaactttcacccgtctcccctgatgggcggatttggactcaaacacccgcctcctcaaattctcatcaaaaacaccccggtacctgctaatcctccagaggtgtttactcctgccaagtttgcctcatttatcacgcagtacagcaccggccaggtcagcgtggagatcgagtgggaactgcagaaagagaacagcaaacgctggaatccagagattcagtacacctcaaattatgccaagtctaataatgtggaatttgctgtcaacaacgaaggggtttatactgagcctcgccccattggcacccgttacctcacccgtaacctgtaattacttgttaatcaataaaccggttgattcgtttcagttgaactttggtctctgcgaagggcgaattc

SEQ ID NO: 437 - protein, 685 aa, Adeno-associated virus
MAADGYLPDWLEDNLSEGIREWWDLKPGAPKPKANQQKQDDGRGLVLPGYKYLGPFNGLDKGEPVNEADAAALEHDKAYDKQLEQGDNPYLKYNHADAEFQERLQEDTSFGGNLGRAVFQAKKRVLEPLGLVEEGAKTAPGKKRPVEPSPQRSPDSSTGIGKTGQQPAKKRLNFGQTGDSESVPDPQPIGEPPAGPSGLGSGTMAAGGGAPMADNNEGADGVGSSSGNWHCDSTWLGDRVITTSTRTWALPTYNNHLYKQISNGTSGGSTNDNTYFGYSTPWGYFDFNRFHCHFSPRDWQRLINNNWGFRPKRLNFKLFNIQVKEVTQNEGTKTIANNLTSTIQVFTDSEYQLPYVLGSAHQGCLPPFPADVFMIPQYGYLTLNNGSQAVGRSSFYCLEYFPSQMLRTGNNFEFSYQFEDVPFHSSYAHSQSLDRLTNPLIDQYLYYLARTQSTTGSTRGLQFHQAGPNTMAEQSKNWLPGPCYRQQRLSKNIDSNNNSNFAWTGATKYHLNGRNSLTNPGVAMATNKDDEDQFFPINGVLVFGKTGAANKTTLENVLMTSEEEIKTTNPVATEEYGVVSSNLQSSTAGPQTQTVNSQGALPGMVWQNRDVYLQGPIWAKIPHTDGNFHPSPLMGGFGLKHPPPQILIKYTSNYYKSTNVDFAVNTEGTYSEPRPIGTRYLTRNL

SEQ ID NO: 438 - DNA, 2969 bp, Adeno-associated virus
gaattcgccctttctacggctgcgtcaactggaccaatgagaactttcccttcaacgattgcgtcgacaagatggtgatctggtgggaggagggcaagatgacggccaaggtcgtggagtccgccaaggccattctcggcggcagcaaggtgcgcgtggaccaaaagtgcaagtcgtccgcccagatcgaccccacccccgtgatcgtcacctccaacaccaacatgtgcgccgtgattgacgggaacagcaccaccttcgagcaccagcagccgttacaagaccggatgttcaaatttgaactcacccgccgtctggagcacgactttggcaaggtgacaaagcaggaagtcaaagagttcttccgctgggcgcaggatcacgtgaccgaggtggcgcatgagttctacgtcagaaagggtggagccaacaagagacccgcccccgatgacgcggataaaagcgagcccaagcgggcctgcccctcagtcgcggatccatcgacgtcagacgcggaaggagctccggtggactttgccgacaggtaccaaaacaaatgttctcgtcacgcgggcatgcttcagatgctgtttccctgcaagacatgcgagagaatgaatcagaatttcaacatttgcttcacgcacgggaccagagactgttcagaatgtttccccggcgtgtcagaatctcaaccggtcgtcagaaagaggacgtatcggaaactctgtgccattcatcatctgctggggcgggctcccgagattgcttgctcggcctgcgatctggtcaacgtggacctggatgactgtgtttctgagcaataaatgacttaaaccaggtatggctgccgatggttatcttccagattggctcgaggacaacctctctgagggcatccgcgagtggtgggacttgaaacctggagccccgaaacccaaagccaaccagcaaaagcaggacgacggccggggtctggtgcttcctggctacaagtacctcggacccttcaacggactcgacaagggagagccggtcaacgaggcagacgccgcggccctcgagcacgacaaggcctacgacaagcagctcgagcagggggacaacccgtacctcaagtacaaccacgccgacgccgagtttcaggagcgtcttcaagaagatacgtcttttgggggcaacctcgggcgagcagtcttccaggccaagaagcgggttctcgaacctctcggtctggttgaggaaggcgctaagacggctcctggaaagaagagaccggtagagccatcaccccagcgttctccagactcctctacgggcatcggcaagacaggccagcagcccgcgaaaaagagactcaactttgggcagactggcgactcagagtcagtgcccgaccctcaaccaatcggagaaccccccgcaggcccctctggtctgggatctggtacaatggctgcaggcggtggcgctccaatggcagacaataacgaaggcgccgacggagtgggtagttcctcaggaaattggcattgcgattccacatggctgggcgacagagtcatcaccaccagcacccgaacctgggccctccccacctacaacaaccacctctacaagcaaatctccaacgggacatcgggaggaagcaccaacgacaacacctacttcggctacagcaccccctgggggtattttgactttaacagattccactgccacttctcaccacgtgactggcagcgactcatcaacaacaactggggattccggcccaagagactcaacttcaagctcttcaacatccaggtcaaggaggtcacgcagaatgaaggcaccaagaccatcgccaataaccttaccagcacgattcaggtctttacggactcggaataccagctcccgtacgtcctcggctctgcgcaccagggctgcctgcctccgttcccggcggacgtcttcatgattcctcagtacgggtacctgactctgaacaacggcagtcaggccgtgggccgttcctccttctactgcctggagtactttccttctcaaatgctgagaacgggcaacaactttgagttcagctaccagtttgaggacgtgccttttcacagcagctacgcgcacagccaaagcctggaccggctgacgaaccccctcatcgaccagtacctgtactacctggcccggacccagagcactacggggtccacaagggggctgcagttccatcaggctgggcccaacaccatggccgagcaatcaaagaactggctgcccggaccctgttatcggcagcagagactgtcaaaaaacatagacagcaacaacaacagtaactttgcctggaccggggccactaaataccatctgaatggtagaaattcattaaccaacccgggcgtagccatggccaccaacaaggacgacgaggaccagttctttcccatcaacggagtgctggtttttggcaaaacgggggctgccaacaagacaacgctggaaaacgtgctaatgaccagcgaggaggagatcaaaaccaccaatcccgtggctacagaagaatacggtgtggtctccagcaacctgcaatcgtctacggccggaccccagacacagactgtcaacagccagggggctctgcccggcatggtctggcagaaccgggacgtgtacctgcagggtcccatctgggccaaaattcctcacacggacggcaactttcacccgtctcccctgatgggcggatttggactcaaacacccgcctcctcaaattctcatcaagtatacttccaactactacaaatctacaaatgtggactttgctgtcaatactgagggtacttattcagagcctcgccccattggcacccgttacctcacccgtaacctgtaattgcctgttaatcaataaaccggttaattcgtttcagttgaactttggtctctgcgaagggcgaattc

SEQ ID NO: 439 - protein, 733 aa, Adeno-associated virus
MAADGYLPDWLEDNLSEGIREWWDLKPGAPKPKANQQKQDDGRGLVLPGYKYLGPFNGLDKGEPVNAADAAALEHDKAYDQQLKAGDNPYLRYNHADAEFQERLQEDTSFGGNLGRAVFQAKKRVLEPLGLVEEGAKTAPGKKRPIESPDSSTGIGKKGQQPAKKKLNFGQTGDSESVPDPQPIGEPPAGPSGLGSGTMAAGGGAPMADNNEGADGVGSSSGNWHCDSTWLGDRVITTSTRTWALPTYNNHLYKQISNGTSGGSTNDNTYFGYSTPWGYFDFNRFHCHFSPRDWQRLINNNWGFRPKRLNFKLFNIQVKEVTQNEGTKTIANNLTSTIQVFTDSEYQLPYVLGSAHQGCLPPFPADVFMIPQYGYLTLNNGSQAVGRSSFYCLEYFPSQMLRTGNNFEFSYQFEDVPFHSSYAHSQSLDRLMNPLIDQYLYYLSRTQSTGGTAGTQQLLFSQAGPNNMSAQAKNWLPGPCYRQQRVSTTVSQNNNSNFAWTGATKYHLNGRDSLVNPGVAMATHKGDEERFFPSSGVLMFGKQGAGKDNVDYSSVMLTSEEEIKTTNPVATEQYGVVADNLQQQNAAPIVGAVNSQGALPGMVWQNRDVYLQGPIWAKIPHTDGNFHPSPLMGGFGLKHPPPQILIKNTPVPADPPTTFSQAKLASFITQYSTGQVSVEIEWELQKENSKRWNPEIQYTSNYYKSTNVDFAVNTEGTYSEPRPIGTRYLTRSL

SEQ ID NO: 440 - DNA, 3113 bp, Adeno-associated virus
gaattcgccctttctacggctgcgtcaactggaccaatgagaactttcccttcaacgattgcgtcgacaagatggtgatctggtgggaggagggcaagatgacggccaaggtcgtggagtccgccaaggccattctcggcggcagcaaggtgcgcgtggaccaaaagtgcaagtcgtccgcccagatcgatcccacccccgtgatcgtcacttccaacaccaacatgtgcgccgtgattgacgggaacagcaccaccttcgagcaccagcagccgttacaagaccggatgttcaaatttgaactcacccgccgtctggagcatgactttggcaaggtgacaaagcaggaagtcaaagagttcttccgctgggcgcaggatcacgtgaccgaggtggcgcatgagttctacgtcagaaagggtggagccaacaagagacccgcccccgatgacgcggataaaagcgagcccaagcgggcctgcccctcagtcgcggatccatcgacgtcagacgcggaaggagctccggtggactttgccgacaggtaccaaaacaaatgttctcgtcacgcgggcatgcttcagatgctgtttccctgcaagacatgcgagagaatgaatcagaatttcaacatttgcttcacgcacgggaccagagactgttcagaatgtttccccggcgtgtcagaatctcaaccggtcgtcagaaagaggacgtatcggaaactctgtgccattcatcatctgctggggcgggctcccgagattgcttgctcggcctgcgatctggtcaacgtggacctggatgactgtgtttctgagcaataaatgacttaaaccaggtatggctgccgatggttatcttccagattggctcgaggacaacctctctgagggcattcgcgagtggtgggacttgaaacctggagccccgaaacccaaagccaaccagcaaaagcaggacgacggccggggtctggtgcttcctggctacaagtacctcggacccttcaacggactcgacaagggggagcccgtcaacgcggcggacgcagcggccctcgagcacgacaaggcctacgaccagcagctcaaagcgggtgacaatccgtacctgcggtataaccacgccgacgccgagtttcaggagcgtcttcaagaagatacgtcttttgggggcaacctcgggcgagcagtcttccaggccaagaagcgggttctcgaacctctcggtctggttgaggaaggcgctaagacggctcctggaaagaagagacccatagaatcccccgactcctccacgggcatcggcaagaaaggccagcagcccgctaaaaagaagctcaactttgggcagactggcgactcagagtcagtgcccgaccctcaaccaatcggagaaccccccgcaggcccctctggtctgggatctggtacaatggctgcaggcggtggcgctccaatggcagacaataacgaaggcgccgacggagtgggtagttcctcaggaaattggcattgcgattccacatggctgggcgacagagtcatcaccaccagcacccgaacctgggccctccccacctacaacaaccacctctacaagcaaatctccaacgggacatcgggaggaagcaccaacgacaacacctacttcggctacagcaccccctgggggtattttgactttaacagattccactgccacttctcaccacgtgactggcagcgactcatcaacaacaactggggattccggcccaagagactcaacttcaagctcttcaacatccaggtcaaggaggtcacgcagaatgaaggcaccaagaccatcgccaataaccttaccagcacgattcaggtctttacggactcggaataccagctcccgtacgtcctcggctctgcgcaccagggctgcctgcctccgttcccggcggacgtcttcatgattcctcagtacgggtacctgactctgaacaacggcagtcaggccgtgggccgttcctccttctactgcctggagtactttccttctcaaatgctgagaacgggcaacaactttgagttcagctaccagtttgaggacgtgccttttcacagcagctatgcgcacagccaaagcctggaccggctgatgaaccccctcatcgaccagtacctgtactacctgtctcggactcagtccacgggaggtaccgcaggaactcagcagttgctattttctcaggccgggcctaataacatgtcggctcaggccaaaaactggctacccgggccctgctaccggcagcaacgcgtctccacgacagtgtcgcaaaataacaacagcaactttgcttggaccggtgccaccaagtatcatctgaatggcagagactctctggtaaatcccggtgtcgctatggcaacgcacaagggcgacgaagagcgattttttccatccagcggagtcttgatgtttgggaaacagggagctggaaaagacaacgtggactatagcagcgttatgctaaccagtgaggaagaaatcaaaaccaccaacccagtggccacagaacagtacggcgtggtggccgataacctgcaacagcaaaacgccgctcctattgtaggggccgtcaacagtcaaggagccttacctggcatggtctggcagaaccgggacgtgtacctgcagggtcctatctgggccaagattcctcacacggacggcaactttcatccttcgccgctgatgggaggctttggactgaaacacccgcctcctcagatcctgattaagaatacacctgttcccgcggatcctccaactaccttcagtcaagccaagctggcgtcgttcatcacgcagtacagcaccggacaggtcagcgtggaaattgaatgggagctgcagaaagagaacagcaagcgctggaacccagagattcagtatacttccaactactacaaatctacaaatgtggactttgctgtcaatactgagggtacttattcagagcctcgccccattggcacccgttacctcacccgtagcctgtaattgcctgttaatcaataaaccggttgattcgtttcagttgaactttggtctctgcgaagggcgaattc

SEQ ID NO: 441 - protein, 738 aa, Adeno-associated virus
MAADGYLPDWLEDNLSEGIREWWDLKPGAPKPKANQQKQDDGRGLVLPGYKYLGPFNGLDKGEPVNAADAAALEHDKAYDQQLKAGDNPYLRYNHADAEFQERLQEDTSFGGNLGRAVFQAKKRVLEPLGLVEEGAKTAPGKKRPVEPSPQRSPDSSTGIGKTGQQPAKKRLNFGQTGDSESVPDPQPIGEPPAGPSGLGSGTMAAGGGAPMADNNEGADGVGSSSGNWHCDSTWLGDRVITTSTRTWALPTYNNHLYKQISNGTSGGSTNDNTYFGYSTPWGYFDFNRFHCHFSPRDWQRLINNNWGFRPKRLNFKLFNIQVKEVTQNEGTKTIANNLTSTIQVFTDSEYQLPYVLGSAHQGCPPPFPADVFMIPQYGYLTLNNGSQAVGRSSFYCLEYFPSQMRRTGNNFEFSYQFEDVPFHSSYAHSQSLDRLMNPLIDQYLYYLSRTQSTGGTAGTQQLLFSQAGPNNMSAQAKNWLPGPCYRQQRVSTTLSQNNNSNFAWTGATKYHLNGRDSLVNPGVAMATHKDDEERFFPSSGVLMFGKQGAGKDNVDYSSVMLTSEEEIKTTNPVATEQYGVVADNLQQQNAAPIVGAVNSQGALPGMVWQNRDVYLQGPIWAKIPHTDGNFHPSPLMGGFGLKHPPPQILIKNTPVPADPPTTFSQAKLASFITQYSTGQVSVEIEWELQKENSKRWNPEIQYTSNYYKSTNVDFAVNTEGTYSEPRPIGTRYLTRNL

SEQ ID NO: 442 - DNA, 3128 bp, Adeno-associated virus
gaattcgccctttctacggctgcgtcaactggaccaatgagaactttcccttcaacgattgcgtcgacaagatggtgatctggtgggaggagggcaagatgacggccaaggtcgtggagtccgccaaggccattctcggcggcagcaaggtgcgcgtggaccaaaagtgcaagtcgtccgcccagatcgaccccacccccgtgatcgtcacctccaacaccaacatgtgcgccgtgattgacgggaacagcaccaccttcgagcaccagcagccgttgcaggaccggatgttcaaatttgaactcacccgccgtctggagcatgactttggcaaggtgacaaagcaggaagtcaaagagttcttccgctgggcgcaggatcacgtgaccgaggtggcgcatgagttctacgtcagaaagggtggagccaacaagagacccgcccccgatgacgcggataaaagcgagcccaagcgggcctgcccctcagtcgcggatccatcgacgtcagacgcggaaggagctccggtggactttgccgacaggtaccaaaacaaatgttctcgtcacgcgggcatgcttcagatgctgtttccctgcaagacatgcgagagaatgaatcagaatttcaacatttgcttcacgcgcgggaccagagactgttcagaatgtttcccgggcgtgtcagaatctcaaccggtcgtcagaaagaggacgtatcggaaactctgtgccattcatcatctgctggggcgggctcccgagattgcttgctcggcctgcgatctggtcaacgtggacctggatgactgtgtttctgagcaataaatgacttaaaccaggtatggctgccgatggttatcttccagattggctcgaggacaacctctctgagggcattcgcgagtggtgggacttgaaacctggagccccgaaacccaaagccaaccagcaaaagcaggacgacggccggggtctggtgcttcctggctacaagtacctcggacccttcaacggactcgacaagggggagcccgtcaacgcggcggacgcagcggccctcgagcacgacaaggcctacgaccagcagctcaaagcgggtgacaatccgtacctgcggtataaccacgccgacgccgagtttcaggagcgtctgcaagaagatacgtcttttgggggcaacctcgggcgagcagtcttccaggccaagaagcgggttctcgaacctctcggtctggttgaggaaggcgctaagacggctcctggaaagaagagaccggtagagccatcaccccagcgttctccagactcctctacgggcatcggcaagacaggccagcagcccgcgaaaaagagactcaactttgggcagactggcgactcagagtcagtgcccgaccctcaaccaatcggagaaccccccgcaggcccctctggtctgggatctggtacaatggctgcaggcggtggcgctccaatggcagacaataacgaaggcgccgacggagtgggtagttcctcaggaaattggcattgcgattccacatggctgggcgacagagtcatcaccaccagcacccgaacctgggccctccccacctacaacaaccacctctacaagcaaatctccaacgggacatcgggaggaagcaccaacgacaacacctacttcggctacagcaccccctgggggtattttgactttaacagattccactgccacttctcaccacgtgactggcagcgactcatcaacaacaactggggattccggcccaagagactcaacttcaagctcttcaacatccaggtcaaggaggtcacgcagaatgaaggcaccaagaccatcgccaataaccttaccagcacgattcaggtctttacggactcggaataccagctcccgtacgtcctcggctctgcgcaccagggctgcccgcctccgttcccggcggacgtcttcatgattcctcagtacgggtacctgactctgaacaacggcagtcaggccgtgggccgttcctccttctactgcctggagtactttccttctcaaatgcggagaacgggcaacaactttgagttcagctaccagtttgaggacgtgccttttcacagcagctacgcgcatagccaaagcctggaccggctgatgaaccccctcatcgaccagtacctgtactacctgtctcggactcagtccacgggaggtaccgcaggaactcagcagttgctattttctcaggccgggcctaataacatgtcggctcaggccaaaaactggctacccgggccctgctaccggcagcaacgcgtctccacgacactgtcgcaaaataacaacagcaactttgcttggaccggtgccaccaagtatcatctgaatggcagagactctctggtaaatcccggtgtcgctatggcaacgcacaaggacgacgaagagcgattttttccatccagcggagtcttgatgtttgggaaacagggagctggaaaagacaacgtggactatagcagcgttatgctaaccagtgaggaagaaatcaaaaccaccaacccagtggccacagaacagtacggcgtggtggccgataacctgcaacagcaaaacgccgctcctattgtaggggccgtcaacagtcaaggagccttacctggcatggtctggcagaaccgggacgtgtacctgcagggtcctatctgggccaagattcctcacacggacggcaactttcatccttcgccgctgatgggaggctttggactgaaacacccgcctcctcagatcctgattaagaatacacctgttcccgcggatcctccaactaccttcagtcaagccaagctggcgtcgttcatcacgcagtacagcaccggacaggtcagcgtggaaattgaatgggagctgcagaaagagaacagcaagcgctggaacccagagattcagtatacttccaactactacaaatctacaaatgtggactttgctgtcaatactgagggtacttattcagagcctcgccccattggcacccgttacctcacccgtaacctgtaattgcctgttaatcaataaaccggttaattcgtttcagttgaactttggtctctgcgaagggcgaattc

SEQ ID NO: 443 - protein, 738 aa, Adeno-associated virus; identical to SEQ ID NO: 431

SEQ ID NO: 444 - DNA, 1933 bp, Adeno-associated virus
  modified_base (1302)..(1302): n is a, c, t or g
  misc_feature (1302)..(1302): n is a, c, g, or t
caaggcctacgaccagcagctcaaagcgggtgacaatccgtacctgcggtataaccacgccgacgccgagtttcaggagcgtcttcaagaagatacgtcttttgggggcaacctcgggcgagcagtcttccaggccaaaaagcgggttctcgaacctcttggtctggttgagacgccagctaagacggcacctggaaagaagcgaccggtagactcgccagactccacctcgggcatcggcaagaaaggccagcagcccgcgaaaaagagactcaactttgggcagactggcgactcagagtcagtccccgaccctcaaccaatcggagaaccaccagcaggcccctctggtctgggatctggtacaatggctgcaggcggtggcgcaccaatggctgacaataacgagggcgccgacggagtgggtaatgcctcaggaaattggcattgcgattccacatggctgggcgacagagtcatcaccaccagcacccgaacctgggccctgcccacctacaacaaccacctctacaagcaaatctccagtcagtcagcagggagcaccaacgataacgtctatttcggctacagcaccccctgggggtattttgacttcaacagattccattgccacttctcaccacgtgactggcagcgacttatcaacaacaactggggattccggcccaagaagctcaacttcaagctcttcaacatccaggtcaaggaggtcacgacgaatgacggtgtcacaaccatcgctaataaccttaccagcacggttcaggtcttttcggactcggaatatcaactgccgtacgtcctcggctccgcgcaccagggctgcctgcctccgttcccggcagacgtgttcatgattccgcagtacggatacctgactctgaacaatggcagccaatcggtaggccgttcctccttctactgcctggagtactttccttctcagatgctgagaacgggcaacaacttcacctttagctacaccttcgaggacgtgcctttccacagcagctacgcgcacagccagagtctggaccggctgatgaatcccctcatcgaccagtacctgtactacttggccagaacacagagcaacgcaggaggtactgctggcaatcgggaactgcagttttatcagggcggacctaccaccatggccgaacaagcaaagaactggctgcccggaccttgcttccggcaacagagagtatccaagacgctggatcaaaataacaacagcaactttgcctggactggtgccacaaaataccatttaaatgnaagaaattcattggttaatcccggtgtcgccatggcaacccacaaggacgacgaggaacgcttcttcccttcgagcggagttctaatttttggcaaaactggagcagctaataaaactacattagaaaacgtgctcatgacaaatgaagaagaaattcgtcctaccaacccggtagctaccgaggaatacgggattgtaagcagcaacttgcaggcggctagcaccgcagcccagacacaagttgttaacaaccagggagccttacctggcatggtctggcagaaccgggacgtgtacctgcaaggtcccatttgggccaagattcctcacacggacggcaactttcacccgtctcctctaatgggtggctttggactgaaacacccgcctccccagatcctgatcaaaaacacaccggtacctgctaatcctccagaagtgtttactcctgccaagtttgcttccttcatcacgcagtacagcaccgggcaagtcagcgttgagatcgagtgggagctgcagaaagagaacagcaagcgctggaacccagagattcagtacacctccaactttgacaaacagactggagtggactttgctgttgacagccagggtgtttactctgagcct

SEQ ID NO: 445 - protein, 733 aa, Adeno-associated virus
MAADGYLPDWLEDNLSEGIREWWDLKPGAPKPKANQQKQDDGRGLVLPGYKYLGPFNGLDKGEPVNAADAAALEHDKAYDQQLKAGDNPYLRYNHADAEFQERLQEDTSFGGNLGRAVFQAKKRVLEPLGLVEEGAKTAPGKKRPLESPQEPDSSSGIGKKGKQPAKKRLNFEEDTGAGDGPPEGSDTSAMSSDIEMRAAPGGNAVDAGQGSDGVGNASGDWHCDSTWSEGKVTTTSTRTWVLPTYNNHLYLRLGTTSNSNTYNGFSTPWGYFDFNRFHCHFSPRDWQRLINNNWGLRPKAMRVKIFNIQVKEVTTSNGETTVANNLTSTVQIFADSSYELPYVMDAGQEGSLSPFPNDVFMVPQYGYCGIVTGENQNQTDRNAFYCLEYFPSQMLRTGNNFEMAYNFGKVPFHSMYAYSQSPDRLMNPLLDQYLWHLQSTTSGETLNQGNAATTFGKIRSGDFAFYRKNWLPGPCVKQQRLSKTASQNYKIPASGGNALLKYDTHYTLNNRWSNIAPGPPMATAGPSDGDFSNAQLIFPGPSVTGNTTTSANNLLFTSEEEIAATNPRDTDMFGQIADNNQNATTAPITGNVTAMGVLPGMVWQNRDIYYQGPIWAKIPHADGHFHPSPLIGGFGLKHPPPQIFIKNTPVPANPATTFTAARVDSFITQYSTGQVAVQIEWEIEKERSKRWNPEVQFTSNYGNQSSMLWAPDTTGKYTEPRVIGSRYLTNHL

SEQ ID NO: 446 - DNA, 3105 bp, Adeno-associated virus
gaattcgcccttgctgcgtcaactggaccaatgagaactttcccttcaacgattgcgtcgacaagatggtgatctggtgggaggagggcaagatgaccgccaaggtcgtggagtccgccaaggccattctgggcggaagcaaggtgcgcgtggaccaaaagtgcaagtcatcggcccagatcgaccccacgcccgtgatcgtcacctccaacaccaacatgtgcgccgtgatcgacgggaacagcaccaccttcgagcaccagcagccgctgcaggaccgcatgttcaagttcgagctcacccgccgtctggagcacgactttggcaaggtgaccaagcaggaagtcaaagagttcttccgctgggctcaggatcacgtgactgaggtggcgcatgagttctacgtcagaaagggcggagccaccaaaagacccgcccccagtgacgcggatataagcgagcccaagcgggcctgcccctcagttgcggagccatcgacgtcagacgcggaagcaccggtggactttgcggacaggtaccaaaacaaatgttctcgtcacgcgggcatgcttcagatgctgtttccctgcaagacatgcgagagaatgaatcagaatttcaacgtctgcttcacgcacggggtcagagactgctcagagtgcttccccggcgcgtcagaatctcaacccgtcgtcagaaaaaagacgtatcagaaactgtgcgcgattcatcatctgctggggcgggcacccgagattgcgtgttcggcccgcgatctcgtcaacgtggacttggatgactgtgtttctgagcaataaatgacttaaaccaggtatggctgctgacggttatcttccagattggctcgaggacaacctctctgagggcattcgcgagtggtgggacctgaaacctggagcccccaagcccaaggccaaccagcagaagcaggacgacggccggggtctggtgcttcctggctacaagtacctcggacccttcaacggactcgacaagggggagcccgtcaacgcggcggacgcagcggccctcgagcacgacaaggcctacgaccagcagctcaaagcgggtgacaatccgtacctgcggtataaccacgccgacgccgagtttcaggagcgtctgcaagaagatacgtcttttgggggcaacctcgggcgagcagtcttccaggccaagaagagggtactcgaacctctgggcctggttgaagaaggtgctaagacggctcctggaaagaagagaccgttagagtcaccacaagagcccgactcctcctcaggaatcggcaaaaaaggcaaacaaccagccaaaaagagactcaactttgaagaggacactggagccggagacggaccccctgaaggatcagataccagcgccatgtcttcagacattgaaatgcgtgcagcaccgggcggaaatgctgtcgatgcgggacaaggttccgatggagtgggtaatgcctcgggtgattggcattgcgattccacctggtctgagggcaaggtcacaacaacctcgaccagaacctgggtcttgcccacctacaacaaccacttgtacctgcggctcggaacaacatcaaacagcaacacctacaacggattctccaccccctggggatactttgactttaacagattccactgtcacttctcaccacgtgactggcaaagactcatcaacaacaactggggactacgaccaaaagccatgcgcgttaaaatcttcaatatccaagttaaggaggtcacaacgtcgaacggcgagactacggtcgctaataaccttaccagcacggttcagatatttgcggactcgtcgtatgagctcccgtacgtgatggacgctggacaagagggaagtctgtctcctttccccaatgacgtcttcatggtgcctcaatatggctactgtggcattgtgactggcgaaaatcagaaccagacggacagaaatgctttctactgcctggagtattttccttcacaaatgctgagaactggcaataactttgaaatggcttacaactttgggaaggtgccgttccactcaatgtatgcttacagccagagcccggacagactgatgaatcccctcctggaccagtacctgtggcacttacagtcgaccacctctggagagactctgaatcaaggcaatgcagcaaccacatttggaaaaatcaggagtggagactttgccttttacagaaagaactggctgcctgggccttgtgttaaacagcagagactctcaaaaactgccagtcaaaattacaagattcctgccagcgggggcaacgctctgttaaagtatgacacccactataccttaaacaaccgctggagcaacatagcgcctggacctccaatggcaacagctggaccttcagatggggacttcagcaacgcccagctcatcttccctggaccatcagtcaccggaaacacaacaacctcagcaaacaatctgttgtttacatcagaagaagaaattgctgccaccaacccaagagacacggacatgtttggtcagattgctgacaataatcagaatgctacaactgctcccataaccggcaacgtgactgctatgggagtgcttcctggcatggtgtggcaaaacagagacatttactaccaagggccaatttgggccaagatcccacacgcggacggacattttcatccttcaccgctaattggcggttttggactgaaacatccgcctccccagatatttatcaaaaacacccccgtacctgccaatcctgcgacaaccttcactgcagccagagtggactctttcatcacacaatacagcaccggccaggtcgctgttcagattgaatgggaaatcgaaaaggaacgctccaaacgctggaatcctgaagtgcagtttacttcaaactatgggaaccagtcttctatgttgtgggctcccgatacaactgggaagtatacagagccgcgggttattggctctcgttatttgactaatcatttgtaactgcctagttaatcaataaaccgtgtgattcgtttcagttgaactttggtctctgcgaagggcgaattc

SEQ ID NO: 447 - protein, 733 aa, Adeno-associated virus
MAADGYLPDWLEDNLSEGIREWWDLKPGAPKPKANQQKQDDGRGLVLPGYKYLGPFNGLDKGEPVNAADAAALEHDKAYDQQLKAGDNPYLRYNHADAEFQERLQEDTSFGGNLGRAVFQAKKRVLEPLGLVEEGAKTAPGKKRPLESPQEPDSSSGIGKKGKQPAKKRLNFEEDTGAGDGPPEGSDTSAMSSDIEMRAAPGGNAVDAGQGSDGVGNASGDWHCDSTWSEGKVTTTSTRTWVLPTYNNHLYLRLGTTSNSNTYNGFSTPWGYFDFNRFHCHFSPRDWQRLINNNWGLRPKAMRVKIFNIQVKEVTTSNGETTVANNLTSTVQIFADSSYELPYVMDAGQEGSLPPFPNDVFMVPQYGYCGIVTGENQNQTDRNAFYCLEYFPSQMLRTGNNFEMAYNFEKVPFHSMYAHSQSLDRLMNPLLDQYLWHLQSTTSGETLNQGNAATTFGKIRSGDFAFYRKNWLPGPCVKQQRFSKTASQNYKIPASGGNALLKYDTHYTLNNRWSNIAPGPPMATAGPSDGDFSNAQLIFPGPSVTGNTTTSANNLLFTSEEEIAATNPRDTDMFGQIADNNQNATTAPITGNVTAMGVLPGMVWQNRDIYYQGPIWAKIPHADGHFHPSPLIGGFGLKHPPPQIFIKNTPVPANPATTFTAARVDSFITQYSTGQVAVQIEWEIEKERSKRWNPEVQFTSNYGNQSSMLWAPDTTGKYTEPRVIGSRYLTNHL

SEQ ID NO: 448 - DNA, 3105 bp, Adeno-associated virus
gaattcgcccttgctgcgtcaactggaccaatgagaactttcccttcaacgattgcgtcgacaagatggtgatctggtgggaggagggcaagatgaccgccaaggtcgtggagtccgccaaggccattctgggcggaagcaaggtgcgcgtggaccaaaagtgcaagtcatcggcccagatcgaccccacgcccgtgatcgtcacctccaacaccaacatgtgcgccgtgatcgacgggaacagcaccaccttcgagcaccagcagccgctgcaggaccgcatgttcaagttcgagctcacccgccgtctggagcacgactttggcaaggtgaccaagcaggaagtcaaagagttcttccgctgggctcaggatcacgtgactgaggtggcgcatgagttctacgtcagaaagggcggagccaccaaaagacccgcccccagtgacgcggatataagcgagcccaagcgggcctgcccctcagttgcggagccatcgacgtcagacgcggaagcaccggtggactttgcggacaggtaccaaaacaaatgttctcgtcacgcgggcatgcttcagatgctgtttccctgcaagacatgcgagagaatgaatcagaatttcaacgtctgcttcacgcacggggtcagagactgctcagagtgcttccccggcgcgtcagaatctcaacccgtcgtcagaaaaaagacgtatcagaaactgtgcgcgattcatcatctgctggggcgggcacccgagattgcgtgttcggcctgcgatctcgtcaacgtggacttggatgactgtgtttctgagcaataaatgacttaaaccaggtatggctgctgacggttatcttccagattggctcgaggacaacctctctgagggcattcgcgagtggtgggacctgaaacctggagcccccaagctcaaggccaaccagcagaagcaggacgacggccggggtctggtgcttcctggctacaagtacctcggacccttccacggactcgacaagggggagcccgtcaacgcggcggacgcagcggccctcgagcacgacaaggcctacgaccagcagctcaaagcgggtgacaatccgtacctgcggtataaccacgccgacgccgagtttcaggagcgtctgcaagaagatacgtcttttgggggcaacctcgggcgagcagtcttccaggccaagaagagggtactcgaaccactgggcctggttgaagaaggtgctaagacggctcctggaaagaagagaccgttagagtcaccacaagagcccgactcctcctcaggaatcggcaaaaaaggcaaacaaccagccaaaaagagactcaactttgaagaggacactggagccggagacggaccccctgaaggatcagataccagcgccatgtcttcagacattgaaatgcgtgcagcaccgggcggaaatgctgtcgatgcgggacaaggttccgatggagtgggtaatgcctcgggtgattggcattgcgattccacctggtctgagggcaaggtcacaacaacctcgaccagaacctgggtcttgcccacctacaacaaccacttgtacctgcggctcggaacaacatcaaacagcaacacctacaacggattctccaccccctggggatactttgactttaacagattccactgtcacttctcaccacgtgactggcaaagactcatcaacaacaactggggactacgaccaaaagccatgcgcgttaaaatcttcaatatccaagttaaggaggtcacaacgtcgaacggcgagactacggtcgctaataaccttaccagcacggttcagatatttgcggactcgtcgtatgagctcccgtacgtgatggacgctggacaagagggaagtctgcctcctttccccaatgacgtcttcatggtgcctcaatatggctactgtggcattgtgactggcgaaaatcagaaccagacggacagaaatgctttctactgcctggagtattttccttcacaaatgctgagaactggcaataactttgaaatggcttacaactttgagaaggtgccgttccactcaatgtatgctcacagccagagcctggacagactgatgaatcccctcctggaccagtacctgtggcacttacagtcgaccacctctggagagactctgaatcaaggcaatgcagcaaccacatttggaaaaatcaggagtggagactttgccttttacagaaagaactggctgcctgggccttgtgttaaacagcagagattctcaaaaactgccagtcaaaattacaagattcctgccagcgggggcaacgctctgttaaagtatgacacccactataccttaaacaaccgctggagcaacatagcgcctggacctccaatggcaacagctggaccttcagatggggacttcagcaacgcccagctcatcttccctggaccatcagtcaccggaaacacaacaacctcagcaaacaatctgttgtttacatcagaaggagaaattgctgccaccaacccaagagacacggacatgtttggtcagattgctgacaataatcagaatgctacaactgctcccataaccggcaacgtgactgctatgggagtgcttcctggcatggtgtggcaaaacagagacatttactaccaagggccaatttgggccaagatcccacacgcggacggacattttcatccttcaccgctaattggcggttttggactgaaacatccgcctccccagatatttatcaaaaacacccccgtacctgccaatcctgcgacaaccttcactgcagccagagtggactctttcatcacacaatacagcaccggccaggtcgctgttcagattgaatgggaaatcgaaaaggaacgctccaaacgccggaatcctgaagtgcagtttacttcaaactatgggaaccagtcttctatgttgtgggctcccgatacaactgggaagtatacagagccgcgggttattggctctcgttatttgactaatcatttgtaactgcctagttaatcaataaaccgtgtgattcgtttcagttgaactttggtctctgcgaagggcgaattc

SEQ ID NO: 449 - protein, 733 aa, Adeno-associated virus
MAADGYLPDWLEDNLSEGIREWWDLKPGAPKPKANQQKQDDGRGLVLPGYEYLGPFNGLDKGEPVNAADAAALEHDKAYDQQLKAGDNPYLRYNHADAEFQERLQEDTSFGGNLGRAVFQAKKRVLEPLGLVEEGAKTAPGKKRPLESPQEPDSSSGIGKKGKQPAKKRLNFEEDTGAGDGPPEGSDTSAMSSDIEMRAAPGGNAVDAGQGSDGVGNASGDWHCDSTWSEGKVTTTSTRTWVLPTYNNHLYLRLGTTSNSNTYNGFSTPWGYFDFNRFHCHFSPRDWQRLINNNWGLRPKAMRVKIFNIQVKEVTTSNGETTVANNLTSTVQIFADSSYELPYVMDAGQEGSLPPFPNDVFMVPQYGYCGIVTGENQNQTDRNAFYCLEYFPSQMLRTGNNFETAYNFEKVPFHSMYAHSQSLDGLMNPLLDQYLWHLQSTTSGETLNQGNAATTFGKIRSGDFAFYRKNWLPGPCVKQQRFSKTASQNYKIPASGGNALLKYDTHYTLNNRWSNIAPGPPMATAGPSDGDFSNAQLIFPGPSVTGNTTTSANNLLFTSEEEIAATNPRDTDMFGQIADNNQNATTAPITGNVTAMGVLPGMVWQNRDIYYQGPIWAKIPHADGHFHPSPLIGGFGLKHPPPQIFIKNTPVPAYPATTFTAARVDSFITQYSTGQVAVQIEWEIEKERSKRWNPEVQFTSNCGNQSSMLWAPDTTGKYTEPRVIGSRYLTNHL

SEQ ID NO: 450 - DNA, 3105 bp, Adeno-associated virus
gaattcgcccttcgcagagaccaaagttcaactgaaacgaatcacacggtttattgattaactaggcagttacaaatgattagtcaaataacgagagccaataacccgcggctctgtatacttcccagttgtatcgggagcccacaacatagaagactggttcccacagtttgaagtaaactgcacttcaggattccagcgtttggagcgttccttttcgatttcccattcaatctgaacagcgacctggccggtgctgtattgtgtgatgaaagagtccactctggctgcagtgaaggttgtcgcaggataggcaggtacgggggtgtttttgataaatatctggggaggcggatgtttcagtccaaaaccgccaattagcggtgaaggatgaaaatgtccgtccgcgtgtgggatcttggcccaaattggcccttggtagtaaatgtctctgttttgccacaccatgccaggaagcactcccatagcagtcacgttgccggttatgggagcagttgtagcattctgattattgtcagcaatctgaccaaacatgtccgtgtctcttgggttggtggcagcaatttcttcttctgatgtaaacaacagattgtttgctgaggttgttgtgtttccggtgactgatggtccagggaagatgagctgggcgttgctgaagtccccatctgaaggtccagctgttgccattggaggtccaggcgctatgttgctccagcggttgtttaaggtatagtgggtgtcatactttaacagagcgttgcccccgctggcaggaatcttgtaattttgactggcagtttttgagaatctctgctgtttaacacaaggcccaggcagccagttctttctgtaaaaggcaaagtctccactcctgatttttccaaatgtggttgctgcattgccttgattcagagtctctccagaggtggtcgactgtaagtgccacaggtactggtccaggaggggattcatcagtccgtccaggctctggctgtgagcatacattgagtggaacggcaccttctcaaagttgtaagccgtttcaaagttattgccagttctcagcatttgtgaaggaaaatactccaggcagtagaaagcatttctgtccgtctggttctgattttcgccagtcacaatgccacagtagccatattgaggcaccatgaagacgtcattggggaaaggaggcagacttccctcttgtccagcgtccatcacgtacgggagctcatacgacgagtccgcaaatatctgaaccgtgctggtaaggttattagcgaccgtagtctcgccgttcgacgttgtgacctccttaacttggatattgaagattttaacgcgcatggcttttggtcgtagtccccagttgttgttgatgagtctttgccagtcacgtggtgagaagtgacagtggaatctgttaaagtcaaagtatccccagggggtggagaatccgttgtaggtgttgctgtttgatgttgttccgagccgcaggtacaagtggttgttgtaggtgggcaagacccaggttctggtcgaggttgttgtgaccttgccctcagaccaggtggaatcgcaatgccaatcacccgaggcattacccactccatcggaaccttgtcccgcatcgacagcatttccgcccggtgctgcacgcatttcaatgtctgaagacatggcgctggtatctgatccttcagggggtccgtctccggctccagtgtcctcttcaaagttgagtctctttttggctggttgtttgccttttttgccgattcctgaggaggagtcgggctcttgtggtgactctaacggtctcttctttccaggagccgtcttagcaccttcttcaaccaggcccagaggttcgagtaccctcttcttggcctggaagactgctcgcccgaggttgcccccaaaagacgtatcttcttgcagacgctcctgaaactcggcgtcggcgtggttataccgcaggtacggattgtcacccgctttgagctgctggtcgtaggccttgtcgtgctcgagggccgctgcgtccgccgcgttgacgggctcccccttgtcgagtccgttgaagggtccgaggtactcgtagccaggaagcaccagaccccggccgtcgtcctgcttctgctggttggccttgggcttgggggctccaggtttcaggtcccaccactcgcgaatgccctcagagaggttgtcctcgagccaatctggaagataaccgtcagcagccatacctggtttaagtcatttattgctcagaaacacagtcatccaagtccacgttgacgagatcgcaggccgaacacgcaatctcgggtgcccgccccagcagatgatgaatcgcgcacagtttctgatacgtcttttttctgacgacgggttgagattctgacgcgccggggaagcactctgagcagtctctgaccccgtgcgtgaagcagacgttgaaattctgattcattctctcgcatgtcttgcagggaaacagcatctgaagcatgcccgcgtgacgagaacatttgttttggtacctgtccgcaaggtccaccggtgcttccgcgtctgacgtcgatggctccgcaactgaggggcaggcccgcttgggctcgcttatatccgcgtcactgggggcgggtcttttggtggctccgccctttctgacgtagaactcatgcgccacctcagtcacgtgatcctgagcccagcggaagaactctttgacttcctgcttggtcaccttgccaaagtcgtgctccagacggcgggtgagctcgaacttgaacatgcggtcctgcagcggctgctggtgctcgaaggtggtgctgttcccgtcgatcacggcgcacatgttggtgttggaggtgacgatcacgggcgtggggtcgatctgggccgatgacttgcacttttggtccacgcgcaccttgcttccgcccagaatggccttggcggactccacgaccttggcggtcatcttgccctcctcccaccagatcaccatcttgtcgacgcaatcgttgaagggaaagttctcattggtccagttgacgcagcaagggcgaattc

SEQ ID NO: 451 - protein, 729 aa, Adeno-associated virus
MAADGYLPDWLEDNLSEGIREWWDLKPGAPKPKANQQKQDDGRGLVLPGYKYLGPFNGLDKGEPVNAADAAALEHDKAYDQQLKAGDNPYLRYNHADAEFQERLQEDTSFGGNLGRAVFQAKKRVLEPLGLVEEGAKTAPGKKRPIDSPDSSTGIGKKGQQPAKKKLNFGQTGDSESVPDPQPLGEPPAAPSSVGSGTMAAGGGAPMADNNEGADGVGNASGNWHCDSTWLGDRVITTSTRTWALPTYNNHLYKQISSSSSGATNDNHYFGYSTPWGYFDFNRFHCHFSPRDWQRLINNNWGFRPKKLRFKLFNIQVKEVTTNDGVTTIANNLTSTVQVFSDSEYQLPYVLGSAHQGCLPPFPADVFMIPQYGYLTLNNGSQSVGRSSFYCLEYFPSQMLRTGNNFEFSYSFEDVPFHSSYAHSQSLDRLMNPLIDQYLYYLARTQSTTGSTRELQFHQAGPNTMAEQSKNWLPGPCYRQQGLSKNLDFNNNSNFAWTAATKYHLNGRNSLTNPGIPMATNKDDEDQFFPINGVLVFGKTGAANKTTLENVLMTSEEEIKTTNPVATEEYGVVSSNLQPSTAGPQSQTINSQGALPGMVWQNRDVYLQGPIWAKIPHTDGNFHPSPLMGGFGLKHPPPQILIKNTPVPANPPEVFTPAKFASFITQYSTGQVSVEIEWELQKENSKRWNPEIQYTSNYAKSNNVEFAVNPDGVYTEPRPIGTRYLPRNL

SEQ ID NO: 452 - DNA, 3094 bp, Adeno-associated virus
gaattcgcccttgctgcgtcaactggaccaagagaactttcccttcaacgattgcgtcgacaagatggtgatctggtgggaggagggcaagatgacggccaaggtcgtggagtccgccaaagccattctgggcggaagcaaggtgcgcgtcgaccaaaagtgcaagtcctcggcccagatcgatcccacccccgtgatcgtcacctccaacaccaacatgtgcgccgtgatcgacgggaacagcaccaccttcgagcaccagcagccgttgcaggaccggatgttcaaatttgaactcacccgccgtctggaacacgactttggcaaggtgaccaagcaggaagtcaaagagttcttccgctgggctagtgatcacgtgactgaggtgacgcatgagttctacgtcagaaagggcggagccagcaaaagacccgcccccgatgacgcggatataagcgagcccaagcgggcctgtccctcagtcacggacccatcgacgtcagacgcggaaggagctccggtggactttgccgacaggtaccaaaacaaatgttctcgtcacgcgggcatgcttcagatgctgtttccctgcaaaacgtgcgagagaatgaatcagaatttcaacatttgcttcacgcacggggtcagagactgtttagaatgtttccccggcgtgtcagaatctcaaccggtcgtcagaaaaaagacgtatcggaagctgtgtgcgattcatcatctgctggggcgggcacccgagattgcttgctcggcctgcgacctggtcaacgtggacctggacgactgtgtttctgagcaataaatgacttaaaccgggtatggctgccgatggttatcttccagattggctcgaggacaacctctctgagggcattcgcgagtggtgggacctgaaacctggagccccgaaacccaaagccaaccagcaaaagcaggacgacggccggggtctggtgcttcctggctacaagtacctcggacccttcaacggactcgacaagggggagcccgtcaacgcggcggacgcagcggccctcgagcacgacaaggcctacgaccagcagctcaaagcgggtgacaatccgtacctgcggtataaccacgccgacgccgagtttcaggagcgtctgcaagaagatacgtcatttgggggcaacctcgggcgagcagtcttccaggccaagaagcgggttctcgaacctctcggtctggttgaggaaggcgctaagacggctcctggaaagaagagacccatagactctccagactcctccacgggcatcggcaaaaaaggccagcagcccgctaaaaagaagctcaattttggtcagactggcgactcagagtcagtccccgaccctcaacctcttggagaacctccagcagcgccctctagtgtgggatctggtacaatggctgcaggcggtggcgcaccaatggcagacaataacgaaggtgccgacggagtgggtaatgcctcaggaaattggcattgcgattccacatggctgggcgacagagtcatcaccaccagcaccagaacctgggccctccccacctacaacaaccacctctacaagcaaatctccagcagcagctcaggagccaccaatgacaaccactacttcggctacagcaccccctgggggtattttgactttaacagattccactgccacttctcaccacgtgactggcagcgactcatcaacaacaactggggattccggcccaagaagctgcggttcaagctcttcaacatccaggtcaaggaggtcacaacgaatgacggcgtcacgaccatcgctaataaccttaccagcacggttcaggtcttctcggactcggaataccagctgccgtacgtcctcggctctgcgcaccagggctgcctgcctccgttcccggcggacgtcttcatgattcctcagtacggctacctgactctgaacaacggcagccaatcggtgggccgttcctccttctactgcctggaatatttcccctctcaaatgctgagaacgggcaacaactttgagttcagttacagcttcgaggacgtgcctttccacagcagctacgcgcacagccagagcctagaccggctgatgaaccctctcatcgaccagtacctgtactacctggcccggacccagagcaccacgggttccaccagggaactgcaatttcatcaagctgggcccaatactatggccgagcagtcaaagaactggctgcctggaccctgctataggcaacagggactgtcaaagaacttggactttaacaacaacagcaattttgcctggactgctgccactaaatatcatctgaatggcagaaactctttgaccaatcctggcattcccatggcaaccaacaaggatgatgaggaccagttctttcccatcaacggggtactggtttttggcaagacgggagctgccaacaaaactacgctggaaaacgttctgatgaccagcgaggaggagatcaagaccactaaccctgtggctacagaagaatacggtgtggtctccagcaacctgcagccgtctacagccgggcctcaatcacagactatcaacagccagggagcactgcctggcatggtctggcagaaccgggacgtgtatctgcagggtcccatctgggccaaaattcctcacacggatggcaactttcacccgtctcctctgatgggcggttttggactcaaacacccgcctccacagatcctgatcaaaaacacacctgtacctgctaatcctccggaggtgtttactcctgccaagtttgcctccttcatcacgcagtacagcaccggacaagtcagcgtggaaatcgagtgggagctgcagaaagaaaacagcaagcgctggaacccagaaattcagtatacttccaattatgccaagtctaataatgttgaatttgctgtgaaccctgatggtgtttatactgagcctcgccccattggcactcgttacctcccccgtaatctgtaattgcttgttaatcaataaaccggttgattcgtttcagttgaactttggtctctgcgaagggcgaattc

SEQ ID NO: 453 - protein, 1458 aa, Adeno-associated virus
MAADGYLPDWLEDNLSEGIREWWDLKPGAPKPKANQQKQDDGRGLVLPGYKYLGPFNGLDKGEPVNAADAAALEHDKAYDQQLKAGDNPYLRYNHADAEFQERLQEDTSFGGNLGRAVFQAKKRVLEPLGLVEEGAKTAPGKKRPIDSPDSSTGIGKKGQQPAKKKLNFGQTGDSESVPDPQPLGEPPAAPSSVGSGTMAAGGGAPTADNNEGADGVGNASGNWHCDSTWLGDRVITTSTRTWALPTYNNHLYKQISSSSSGATNDNHYFGYSTPWGYFDFNRFHCHFSPRDWQRLINNNWGFRPKKLRFKLFNIQVKEVTTNDGVTTIANNLTSTVQVFSDSEYQLPYVLGSAHQGCLPPFPADVFMIPQYGYLTLNNGSQSVGRSSFYCLEYFPSQMLRTGNNFEFSYSFEDVPFHSSYAHSQSLDRLMNPLIDQYLYYLARTQSTTGSTRELQFHQAGPNTMAEQSKNWLPGPCYRQQRLSKNLDFNNNSNFAWTAATKYHLNGRNSLTNPGIPMATNKDDEDQFFPINGVLVFGKTGAANKTTLENVLMTSEEEIKTTNPVATEEYGVVSSNLQSSTAGPQSQTINSQGALPGMVWQNRDVYLQGPIWAKIPHTDGNFHPSPLMGGFGLEHPPPQILIKNTPVPANPPEVFTPAKFASFITQYSTGQVSVEIEWELQKENSKRWNPEIQYTSNYAKSNNVEFAVNPDGVYTEPRPIGTRYLTRNLMAADGYLPDWLEDNLSEGIREWWDLKPGAPKPKANQQKQDDGRGLVLPGYKYLGPFNGLDKGEPVNAADAAALEHDKAYDQQLKAGDNPYLRYNHADAEFQERLQEDTSFGGNLGRAVFQAKKRVLEPLGLVEEGAKTAPGKKRPIGSPDSSTGIGKKGQQPAKKKLNFGQTGDSESVPDPQPLGEPPAAPSSVGSGTMAAGGGAPMADNNEGADGVGNASGNWHCDSTWLGDRVITTSTRTWALPTYNNHLYKQISSSSSGATNDNHYFGYSTPWGYFDFNRFHCHFSPRDWQRLINNNWGFRPKKLRFKLLNIQVKEVTTNDGVTTIANNLTSTVQVFSDSEYQLPYVLGSAHQGCLPPFPADVFMIPQYGYLTLDNGSQSVGRSSFYCLEYFPSQMLRTGNNFEFSYSFEDVPFHSSYAHSQSLDRLMNPLIDQYLYYLARTQSTTGSTRELQFHQAGPNTMAEQSKNWLPGPCYRQQRLSKNLDFNNNSNFAWTAATKYHLNGRNSLTNPGIPMATNKDDEDQFFPINGVLVFGKTGAANKTTLENVLMTSEEEIKTTNPVATEEYGVVSSNLQSSTAGPQSQTINSQGALPGMVWQNRDVYLQGPIWAKIPHTDGNFHPSPLMGGFGLKHPPPQILIKNTPVPANPPEVFTPAKFASFITQYSTGQVSVEIEWELQKENSKRWNPEIQYTSNYAKSNNVEFAVNPDGVYTEPRPIGTRYLTRNL

SEQ ID NO: 454 - DNA, 3095 bp, Adeno-associated virus
gaattcgcccttcgcagagaccaaagttcaactgaaacgaatcaaccggtttattgattaacaagcaattacagattacgggtgaggtaacgagtgccaatggggcgaggctcagtataaacaccatcagggttcacagcaaattcaacattattagacttggcataattggaagtatactgaatttctgggttccagcgcttgctgttttctttctgcagctcccactcgatttccacgctgacttgtccggtgctgtactgcgtgatgaaggaggcaaacttggcaggagtaaacacctccggaggattagcaggtacaggtgtgtttttgatcaggatctgtggaggcgggtgtttgagtccaaaaccgcccatcagaggagacgggtgaaagttgccatccgtgtgaggaattttggcccagatgggaccctgcagatacacgtcccggttctgccagaccatgccaggcagtgctccctggctgttgatagtctgtgattgaggcccggctgtagacgactgcaggttgctggagaccacaccgtattcttctgtagccacagggttagtggtcttgatctcctcctcgctggtcatcagaacgttttccagcgtagttttgttggcagctcccgtcttgccaaaaaccagtaccccgttgatgggaaagaactggtcctcatcatccttgttggttgccatgggaatgccaggattggtcaaagagtttctgccattcagatgatatttagtggcagcagtccaggcaaaattgctgttgttgttaaagtccaagttctttgacagtctctgttgcctatagcagggtccaggcagccagttctttgactgctcggccatagtattgggcccagcttgatgaaattgcagttccctggtggaacccgtggtgctctgggtccgggccaggtagtacaggtactggtcgatgagagggttcatcagccggtctaggctctggctgtgcgcgtagctgctgtggaaaggcacgtcctcgaagctgtaactgaactcaaagttgttgcccgttctcagcatttgagaggggaaatattccaggcagtagaaggaggaacggcccaccgattggctgccgttgtccagagtcaggtagccgtactgaggaatcatgaagacgtccgccgggaacggaggcaggcagccctggtgcgcagagccgaggacgtacggcagctggtattccgagtccgagaagacctgaaccgtgctggtaaggttattagcgatggtcgtgacgccgtcattcgttgtgacctccttgacctggatgttgaggagcttgaaccgcagcttcttgggccggaatccccagttgttgttgatgagtcgctgccagtcacgtggtgagaagtggcagtggaatctgttaaagtcaaaatacccccagggggtgctgtagccgaagtagtggttgtcattggtggctcctgagctgctgctggagatttgcttgtagaggtggttgttgtaggtggggagggcccaggttctggtgctggtggtgatgactctgtcgcccagccatgtggaatcgcaatgccaatttcctgaggcattacccactccgtcggcaccttcgttattgtctgccattggtgcgccaccgcctgcagccattgtaccagatcccacactagagggcgctgctggaggttctccaagaggttgagggtcggggactgactctgagtcgccagtctgaccaaaattgagcttctttttagcgggctgctggccttttttgccgatgcccgtggaggagtctggagagcctatgggtctcttctttccaggagccgtcttagcgccttcctcaaccagaccgagaggttcgagaacccgcttcttggcctggaagactgctcgcccgaggttgcccccaaatgacgtatcttcttgcagacgctcctgaaactcggcgtcggcgtggttataccgcaggtacggattgtcacccgctttgagctgctggtcgtaggccttgtcgtgctcgagggccgctgcgtccgccgcgttgacgggctcccccttgtcgagtccgttgaagggtccgaggtacttgtagccaggaagcaccagaccccggccgtcgtcctgcttttgctggttggctttgggtttcggggctccaggtttcaggtcccaccactcgcgaatgccctcagagaggttgtcctcgagccaatctggaagataaccatcggcagccatacctggtttaagtcatttattgctcagaaacacagtcgtccaggtccacgttgaccaggtcgcaggccgagcaagcaatctcgggtgcccgccccagcagatgatgaatcgcacacagcttccgatacgtcttttttctgacgaccggttgagattctgacacgccggggaaacattctaaacagtctctgaccccgtgcgtgaagcaaatgttgaaattctgattcattctctcgcacgttttgcagggaaacagcacctgaagcatgcccgcgtgacgagaacatttgttttggtacctgtcggcaaagtccaccggagctccttccgcgtctgacgtcgatgggtccgtgactgagggacgggcccgcttgggctcgcttatatccgcgtcatcgggggcgggtcttttgctggctccgccctttctgacgtagaactcatgcgtcacctcagtcacgtgatcactagcccagcggaagaactctttgacttcctgctttgtcaccttgccaaagtcgtgttccagacggcgggtgagttcaaatttgaacatccggtcctgcaacggttgctggtgctcgaaggtggtgctgttcccgtcgatcacggcgcacatgttggtgttggaggtgacgatcacgggggtgggatcgatctgggcggacgacttgcacttttggtccacgcgcaccttgctgccgccgagaatggccttggcggactccacgaccttggccgtcatcttgccctcctcccaccagatcaccatcttgtcgacgcaatcgttgaagggaaagttctcattggtccagttgacgcagcaagggcgaattc

SEQ ID NO: 455 - DNA, 3095 bp, Adeno-associated virus
gaattcgcccttcgcagagaccaaagttcaactgaaacgaatcaaccggtttattgattaacaagcaattacagattacgggtgaggtaacgagtgccaatggggcgaggctcagtataaacaccatcagggttcacagcaaattcaacattattagacttggcataattggaagtatactgaatttctgggttccagcgcttgctgttttctttctgcagctcccactcgatttccacgctgacttgtccggtgctgtactgcgtgatgaaggaggcaaacttggcaggagtaaacacctccggaggattagcaggtacaggtgtgtttttgatcaggatctgtggaggcgggtgttcgagtccaaaaccgcccatcagaggagacgggtgaaagttgccatccgtgtgaggaattttggcccagatgggaccctgcagatacacgtcccggttctgccagaccatgccaggcagtgctccctggctgttgatagtctgtgattgaggcccggctgtagacgactgcaggttgctggagaccacaccgtattcttctgtagccacagggttagtggtcttgatctcctcctcgctggtcatcagaacgttttccagcgtagttttgttggcagctcccgtcttgccaaaaaccagtaccccgttgatgggaaagaactggtcctcatcatccttgttggttgccatgggaatgccaggattggtcaaagagtttctgccattcagatgatatttagtggcagcagtccaggcaaaattgctgttgttgttaaagtccaagttctttgacagtctctgttgcctatagcagggtccaggcagccagttctttgactgctcggccatagtattgggcccagcttgatgaaattgcagttccctggtggaacccgtggtgctctgggtccgggccaggtagtacaggtactggtcgatgagagggttcatcagccggtctaggctctggctgtgcgcgtagctgctgtggaaaggcacgtcctcgaagctgtaactgaactcaaagttgttgcccgttctcagcatttgagaggggaaatattccaggcagtagaaggaggaacggcccaccgattggctgccgttgttcagagtcaggtagccgtactgaggaatcatgaagacgtccgccgggaacggaggcaggcagccctggtgcgcagagccgaggacgtacggcagctggtattccgagtccgagaagacctgaaccgtgctggtaaggttattagcgatggtcgtgacgccgtcattcgttgtgacctccttgacctggatgttgaagagcttgaaccgcagcttcttgggccggaatccccagttgttgttgatgagtcgctgccagtcacgtggtgagaagtggcagtggaatctgttaaagtcaaaatacccccagggggtgctgtagccgaagtagtggttgtcattggtggctcctgagctgctgctggagatttgcttgtagaggtggttgttgtaggtggggagggcccaggttctggtgctggtggtgatgactctgtcgcccagccatgtggaatcgcaatgccaatttcctgaggcattacccactccgtcggcaccttcgttattgtctgccgttggtgcgccaccgcctgcagccattgtaccagatcccacactagagggcgctgctggaggttctccaagaggttgagggtcggggactgactctgagtcgccagtctgaccaaaattgagcttctttttagcgggctgctggccttttttgccgatgcccgtggaggagtctggagagtctatgggtctcttctttccaggagccgtcttagcgccttcctcaaccagaccgagaggttcgagaacccgcttcttggcctggaagactgctcgcccgaggttgcccccaaatgacgtatcttcttgcaggcgctcctgaaactcggcgtcggcgtggttataccgcaggtacggattgtcacccgctttgagctgctggtcgtaggccttgtcgtgctcgagggccgctgcgtccgccgcgttgacgggctcccccttgtcgagtccgttgaagggtccgaggtacttgtagccaggaagcaccagaccccggccgtcgtcctgcttttgctggttggctttgggtttcggggctccaggtttcaggtcccaccactcgcgaatgccctcagagaggttgtcctcgagccaatctggaagataaccatcggcagccatacctggtttaagccatttattgctcagaaacacagtcgtccaggtccacgttgaccaggtcgcaggccgagcaggcaatctcgggtgcccgccccagcagatgatgaatcgcacacagcttccgatacgtcttttttctgacgaccggttgagattctgacacgccggggaaacattctaaacagtctctgaccccgtgcgtgaagcaaatgttgaaattctgattcattctctcgcacgttttgcagggaaacagcatctgaagcatgcccgcgtggcgagaacatttgttttggtacctgtcggcaaagtccaccggagctccttccgcgtctgacgtcgatgggtccgtgactgagggacaggcccgcttgggctcgcttatatccgcgtcatcgggggcgggtcttttgctggctccgccctttctgacgtagaactcatgcgtcacctcagtcacgtgatcactagcccagcggaagaactctttgacttcctgctttgtcaccttgccaaagtcgtgttccagacggcgggtgagttcaaatttgaacatccggtcctgcaacggctgctggtgctcgaaggtggtgctgttcccgtcgatcacggcgcgcatgttggtgttggaggtgacgatcacgggggtgggatcgatctgggcggacgacttgcacttttggtccacgcgcaccttgctgccgccgagaatggccttggcggactccacgaccttggccgtcatcttgccctcctcccaccagatcaccatcttgtcgacgcaatcgttgaagggaaagttctcattggtccagttgacgcagcaagggcgaattc

SEQ ID NO: 456 - protein, 729 aa, Adeno-associated virus; identical to SEQ ID NO: 184

SEQ ID NO: 457 - protein, 729 aa, Adeno-associated virus
MAADGYLPDWLEDNLSEGIREWWDLKPGAPKPKANQQKQDDGRGLVLPGYKYLGPFNGLDKGEPVNAADAAALEHDKAYDQQLKAGDNPYLRYNHADAEFQERLQEDTSFGGNLGRAVFQAKKRVLEPLGLVEEGAKTAPGKKRPIDSPDSSTGIGKKGQQPAKKKLNFGQTGDSESVPDPQPLGEPPAAPSSVGSGTMAAGGGAPTADNNEGADGVGNASGNWHCDSTWLGDRVITTSTRTWALPTYNNHLYKQISSSSSGATNDNHYFGYSTPWGYFDFNRFHCHFSPRDWQRLINNNWGFRPKKLRFKLFNIQVKEVTTNDGVTTIANNLTSTVQVFSDSEYQLPYVLGSAHQGCLPPFPADVFMIPQYGYLTLNNGSQSVGRSSFYCLEYFPSQMLRTGNNFEFSYSFEDVPFHSSYAHSQSLDRLMNPLIDQYLYYLARTQSTTGSTRELQFHQAGPNTMAEQSKNWLPGPCYRQQRLSKNLDFNNNSNFAWTAATKYHLNGRNSLTNPGIPMATNKDDEDQFFPINGVLVFGKTGAANKTTLENVLMTSEEEIKTTNPVATEEYGVVSSNLQSSTAGPQSQTINSQGALPGMVWQNRDVYLQGPIWAKIPHTDGNFHPSPLMGGFGLKHPPPQILIKNTPVPANPPEVFTPAKFASFITQYSTGQVSVEIEWELQKENSKRWNPEIQYTSNYAKSNNVEFAVNPDGVYTEPRPIGTRYLTRNL

SEQ ID NO: 458 - protein, 729 aa, Adeno-associated virus
MAADGYLPDWLEDNLSEGIREWWDLKPGAPKPKANQQKQDDGRGLVLPGYKYLGPFNGLDKGEPVNAADAAALEHDKAYDQQLKAGDNPYLRYNHADAEFQERLQEDTSFGGNLGRAVFQAKKRVLEPLGLVEEGAKTAPGKKRPIDSPDSSTGIGKKGQQPAKKKLNFGQTGDSESVPDPQPLGEPPAAPSSVGSGTMAAGGGAPMADNNEGADGVGNASGNWHCDSTWLGDRVITTSTRTWALPTYNNHLYKQISSSSSGATNDNHYFGYSTPWGYFDFNRFHCHFSPRDWQRLINNNWGFRPKKLRFKLFNIQVKEVTTNDGVTTIANNLTSTVQVFSDSEYQLPYVLGSAHQGCLPPFPADVFMIPQYGYLTLNNGSQSVGRSSFYCLEYFPSQMLRTGNNFEFSYSFEDVPFHSSYAHSQSLDRLMNPLIDQYLYYLARTQSTTGSTRELQFHQAGPNTMAEQSKNWLPGPCYRQQRLSKNLDFNNNSNFAWTAATKYHLNGRNSLTNPGIPMATNKDDEDQFFPINGVLVFGKTGAANKTTLENVLMTSEEEIKTTNPVATEEYGVVSSNLQSSTAGPQSQTINSQGALPGMVWQNRDVYLQGPIWAKIPHTDGNFHPSPLMGGFGLKHPPPQILIKNTPVPANPPEVFTPAKFASFITQYSTGQVSVEIEWELQKENSKRWNPEIQYTSNYAKSNNVEFAVNPDGVYTEPRPIGTRYLTRNL

SEQ ID NO: 459 - DNA, 2217 bp, Adeno-associated virus
atggctgctgacggttatcttccagattggctcgaggacaacctctctgagggcattcgcgagtggtgggacctgaaacctggagcccccaagcccaaggccaaccagcagaagcaggacgacggccggggtctggtgcttcctggctacaagtacctcggacccttcaacggactcgacaagggggagcccgtcaacgcggcggacgcagcggccctcgagcacgacaaggcctacgaccagcagctcaaagcgggtgacaatccgtacctgcggtataaccacgccgacgccgagtttcaggagcgtctacaagaagatacgtcttttgggggcaacctcgggcgagcagtcttccaggccaagaagcgggttctcgaacctctcggtctggttgaggaagctgctaagacggctcctggaaagaagagaccggtagaaccgtcacctcagcgttcccccgactcctccacgggcatcggcaagaaaggccagcggcccgctaaaaagagactgaactttggtcagactggcgactcagagtcagtccccgaccctcaaccaatcggagaaccaccagcaggcccctctggtctgggatctggtacaatggctgcaggcggtggcgctccaatggcagacaataacgaaggcgccgacggagtgggtagttcctcaggaaattggcattgcgattccacatggctgggcgacagagtcatcaccaccagcacccgaacctgggccctgcccacctacaacaaccacctctacaagcaaatatccaatgggacatcgggaggaagcaccaacgacaacacctacttcggctacagcaccccctgggggtattttgacttcaacagattccactgccacttctcaccacgtgactggcagcgactcatcaacaacaactggggattccggccaaaaagactcagcttcaagcccttcaacatccaggtcaaggaggtcacgcagaatgaaggcaccaagaccatcgccaataaccttaccagcacgattcaggtatttacggactcggaataccagctgccgtacgtcctcggctccgcgcaccagggctgcctgcctccgttcccggcggacgtcttcatgattccccagtacggctaccttacactgaacaatggaagtcaagccgtaggccgttcctccttctactgcctggaatattttccatctcaaatgctgcgaactggaaacaattttgaattcagctacaccttcgaggacgtgcctttccacagcagctacgcacacagccagagcttggaccgactgatgaatcctctcatcgaccagtacctgcactacttatccagaactcagtccacaggaggaactcaaggtacccagcaattgttattttctcaagctgggcctgcaaacatgtcggctcaggctaagaactggctacctggaccttgctaccggcagcagcgagtctctacgacactgtcgcaaaacaacaacagcaactttgcttggactggtgccaccaaatatcacctgaacggaagagactctttggtaaatcccggtgtcgccatggcaacccacaaggacgacgaggaacgcttcttcccgtcgagtggagtcctgatgtttggaaaacagggtgctggaagagacaatgtggactacagcagcgttatgctaaccagcgaagaagaaattaaaaccactaaccctgtagccacagaacaatacggtgtggtggctgacaacttgcagcaaaccaatacagggcctattgtgggaaatgtcaacagccaaggagccttacctggcatggtctggcagaaccgagacgtgtacctgcagggtcccatctgggccaagattcctcacacggacggcaacttccacccttcaccgctaatgggaggatttggactgaagcacccacctcctcagatcctgatcaagaacacgccggtacctgcggatcctccaacaacgttcagccaggcgaaattggcttccttcattacgcagtacagcaccggacaggtcagcgtggaaatcgagtgggagctgcagaaggagaacagcaaacgctggaacccagagattcagtacacttcaaactactacaaatctacaaatgtggactttgctgtcaatacagagggaacttattctgagcctcgccccattggtactcgctacctcacccgtaatctgtaa

SEQ ID NO: 460 - protein, 738 aa, Adeno-associated virus
MAADGYLPDWLEDNLSEGIREWWDLKPGAPKPKANQQKQDDGRGLVLPGYKYLGPFNGLDKGEPVNAADAAALEHDKAYDQQLKAGDNPYLRYNHADAEFQERLQEDTSFGGNLGRAVFQAKKRVLEPLGLVEEAAKTAPGKKRPVEPSPQRSPDSSTGIGKKGQRPAKKRLNFGQTGDSESVPDPQPIGEPPAGPSGLGSGTMAAGGGAPMADNNEGADGVGSSSGNWHCDSTWLGDRVITTSTRTWALPTYNNHLYKQISNGTSGGSTNDNTYFGYSTPWGYFDFNRFHCHFSPRDWQRLINNNWGFRPKRLSFKPFNIQVKEVTQNEGTKTIANNLTSTIQVFTDSEYQLPYVLGSAHQGCLPPFPADVFMIPQYGYLTLNNGSQAVGRSSFYCLEYFPSQMLRTGNNFEFSYTFEDVPFHSSYAHSQSLDRLMNPLIDQYLHYLSRTQSTGGTQGTQQLLFSQAGPANMSAQAKNWLPGPCYRQQRVSTTLSQNNNSNFAWTGATKYHLNGRDSLVNPGVAMATHKDDEERFFPSSGVLMFGKQGAGRDNVDYSSVMLTSEEEIKTTNPVATEQYGVVADNLQQTNTGPIVGNVNSQGALPGMVWQNRDVYLQGPIWAKIPHTDGNFHPSPLMGGFGLKHPPPQILIKNTPVPADPPTTFSQAKLASFITQYSTGQVSVEIEWELQKENSKRWNPEIQYTSNYYKSTNVDFAVNTEGTYSEPRPIGTRYLTRNL

SEQ ID NO: 461 - DNA, 2217 bp, Adeno-associated virus
atggctgctgacggttatcttccagattggctcgaggacaacctctctgagggcattcgcgagtggtgggacctgaaacctggagcccccaagcccaaggccaaccagcagaagcaggacgacggccggggtctggtgcttcctggctacaagtacctcggacccttcaacggactcgacaagggggagcccgtcaacgcggcggacgcagcggccctcgagcacgacaaggcctacgaccagcagctcaaagcgggtgacaatccgtacctgcggtataaccacgccgacgccgagtttcaggagcgtctgcaagaagatacgtcttttgggggcaacctcgggcgagcagtcttccaggccaagaagcgggttctcgaacctctcggtctggttgaggaagctgctaagacggctcctggaaagaagagaccggtagaaccgtcacctcagcgttcccccgactcctccacgggcatcggcaagaaaggccagcagcccgctaaaaagagactgaactttggtcagactggcgactcagagtcagtccccgaccctcaaccaatcggagaaccaccagcaggcccctctggtctgggatctggtacaatggctgcaggcggtggcgctccaatggcagacaataacgaaggcgccgacggagtgggtagttcctcaggaaattggcattgcgattccacatggctgggcgacagagtcatcaccaccagcacccgaacctgggccctgcccacctacaacaaccacctctacaagcaaatatccaatgggacatcgggaggaagcaccaacgacaacacctacttcggctacagcaccccctgggggtattttgacttcaacagattccactgccacttctcaccacgtgactggcagcgactcatcaacaacaactggggattccggccaaaaagactcagcttcaagctcttcaacatccaggtcaaggaggtcacgcagaatgaaggcaccaagaccatcgccaataaccttaccagcacgattcaggtatttacggactcggaataccagctgccgtacgtcctcggctccgcgcaccagggctgcctgcctccgttcccggcggacgtcttcatgattccccagtacggctaccttacactgaacaatggaagtcaagccgtaggccgttcctccttctactgcctggaatattttccatctcaaatgctgcgaactggaaacaattttgaattcagctacaccttcgaggacgtgcctttccacagcagctacgcacacagccagagcttggaccgactgatgaatcctctcatcgaccagtacctgtactacttatccagaactcagtccacaggaggaactcaaggtacccagcaattgttattttctcaagctgggcctgcaaacatgtcggctcaggctaagaactggctacctggaccttgctaccggcagcagcgagtctctacgacactgtcgcaaaacaacaacagcaactttgcttggactggtgccaccaaatatcacctgaacggaagagactctttggtaaatcccggtgtcgccatggcaacccacaaggacgacgaggaacgcttcttcccgtcgagtggagtcctgatgtttggaaaacagggtgctggaagagacaatgtggactacagcagcgttatgctaaccagcgaagaagaaattaaaaccactaaccctgtagccacagaacaatacggtgtggtggctgataacttgcagcaaaccaatacggggcctattgtgggaaatgtcaacagccaaggagccttacctggcatggtctggcagaaccgagacgtgtacctgcagggtcccatctgggccaagattcctcacacggacggcaacttccacccttcaccgctaatgggaggatttggactgaagcacccacctcctcagatcctgatcaagaacacgccggtacctgcggatcctccaacaacgttcagccaggcgaaattggcttccttcattacgcagtacagcaccggacaggtcagcgtggaaatcgagtgggagctgcagaaggagaacagcaaacgctggaacccagagattcagtacacttcaaactactacaaatctacaaatgtggactttgctgtcaatacagagggaacttattctgagcctcgccccattggtactcgttacctcacccgtaatctgtaa

SEQ ID NO: 462 - protein, 738 aa, Adeno-associated virus; identical to SEQ ID NO: 114

SEQ ID NO: 463 - protein, 738 aa, Adeno-associated virus
MAADGYLPDWLEDNLSEGIREWWDLKPGAPKPKANQQKQDDGRGLVLPGYKYLGPFNGLDKGEPVNAADAAALEHDKAYDQQLKAGDNPYLRYNHADAEFQERLQEDTSFGGNLGRAVFQAKKRVLEPLGLVEEAAKTAPGKKRPVEPSPQRSPDSSTGIGKKGQQPAKKRLNFGQTGDSESVPDPQPIGEPPAGPSGLGSGTMAAGGGAPMADNNEGADGVGSSSGNWHCDSTWLGDRVITTSTRTWALPTYNNHLYKQISNGTSGGSTNDNTYFGYSTPWGYFDFNRFHCHFSPRDWQRLINNNWGFRPKRLSFKLFNIQVKEVTQDEGTKTIANNLTSTIQVFTDSEYQLPYVLGSAHQGCLPPFPADVFMIPQYGYLTLNNGSQAVGRSSFYCLEYFPSQMLRTGNNFEFSYTFEDVPFHSSYAHSQSLDRLMNPLIDQYLYYLSRTQSTGGTQGTQQLLFSQAGPANMSARAKNWLPGPCYRQQRVSTTLSQNNNSNFAWTGATKYHLNGRDSLVNPGVAMATHKDDEERFFPSSGVLMFGKQGAGRDNVDYSSVMLTSEEEIKTTNPVATEQYGVVADNLQQANTGPIVGNVNSQGALPGMVWQNRDVYLQGPIWAKIPHTDGNFHPSPLMGGFGLKHPPPQILIKNTPVPADPPTTFSQAKLASFITQYSTGQVSVEIEWELQKENSKRWNPEIQYTSNYYKSTNVDFAVNSEGTYSEPRPIGTRYLTRNL

SEQ ID NO: 464 - DNA, 2217 bp, Adeno-associated virus
atggctgctgacggttatcttccagattggctcgaggacaacctctctgagggcattcgcgagtggtgggacctgaaacctggagcccccaagcccaaggccaaccagcagaagcaggacgacggccggggtctggtgcttcctggctacaagtacctcggacccttcaacggactcgacaagggggagcccgtcaacgcggcggacgcagcggccctcgagcacgacaaggcctacgaccagcagctcaaagcgggtgacaatccgtacctgcggtataaccacgccgacgccgagtttcaggagcgtctgcaagaagatacgtcttttgggggcaacctcgggcgagcagtcttccaggccaagaagcgggttctcgaacctctcggtctggttgaggaagctgctaagacggctcctggaaagaagagaccggtagaaccgtcacctcagcgttcccccgactcctccacgggcatcggcaagaaaggccagcagcccgctaaaaagagactgaactttggtcagactggcgactcagagtcagtccccgaccctcaaccaatcggagaaccaccagcaggcccctctggtctgggatctggtacaatggctgcaggcggtggcgctccaatggcagacaataacgaaggcgccgacggagtgggtagttcctcaggaaattggcattgcgattccacatggctgggcgacagagtcatcaccaccagcacccgaacctgggccctgcccacctacaacaaccacctctacaagcaaatatccaatgggacatcgggaggaagcaccaacgacaacacctacttcggctacagcaccccctgggggtattttgacttcaacagattccactgccacttctcaccacgtgactggcagcgactcatcaacaacaactggggattccggccaaaaagactcagcttcaagctcttcaacatccaggtcaaggaggtcacgcaggatgaaggcaccaagaccatcgccaataaccttaccagcacgattcaggtatttacggactcggaataccagctgccgtacgtcctcggctccgcgcaccagggctgcctgcctccgttcccggcggacgtcttcatgattccccagtacggctaccttacactgaacaatggaagtcaagccgtaggccgttcctccttctactgcctggaatattttccatctcaaatgctgcgaactggaaacaattttgaattcagctacaccttcgaggacgtgcctttccacagcagctacgcacacagccagagcttggaccgactgatgaatcctctcatcgaccagtacctgtactacttatccagaactcagtccacaggaggaactcaaggtacccagcaattgttattttctcaagctgggcctgcaaacatgtcggctcgggctaagaactggctacctggaccttgctaccggcagcagcgagtctctacgacactgtcgcaaaacaacaacagcaactttgcttggactggtgccaccaaatatcacctgaacggaagagactctttggtaaatcccggtgttgctatggcaacgcataaggacgacgaggaacgtttctttccatcgagcggagtcctgatgtttggaaaacagggtgctggaagagacaatgtggactatagcagcgttatgctaaccagcgaggaagaaattaaaaccactaaccctgtagccacagaacaatacggtgtggtggctgacaacttgcagcaagccaatacagggcctattgtgggaaatgtcaacagccaaggagccttacctggcatggtctggcagaaccgagacgtgtacctgcagggtcccatctgggccaaaattcctcacacggacggcaattttcacccgtctcctctgatgggcggctttggactgaagcacccacctccccagatcctgatcaagaatacgccggtacctgcggatcctccaacgacgttcagccaggcaaaattggcttccttcatcacgcagtacagcaccggccaggtcagcgtggagatcgagtgggagctgcagaaggagaacagcaagcgatggaacccagaaattcagtacacttccaactactacaaatctacaaatgtggactttgctgtcaattctgagggtacatattcagagcctcgccccattggtactcgttatctgacacgtaatctgtaa

SEQ ID NO: 465 - DNA, 2211 bp, Adeno-associated virus
atggctgccgatggttatcttccagattggctcgaggacaacctctctgagggcattcgcgagtggtgggacttgaaacctggagccccgaaacccaaagccaaccagcaaaagcaggacgacggccggggcctggtgcttcctggctacaagtacctcggacccttcaacggactcgacaagggggagcccgtcaacgcggcggacgcagcggccctcgagcacgacaaggcctacgaccagcagctcgaagcgggtgacaatccgtacctgcggtataaccacgccgacgccgagtttcaggagcgtctgcaagaagatacgtcttttgggggcaacctcgggcgagcagtcttccaggccaagaagcgggttctcgaacctctcggtctggttgaggaaggcgctaagacggctcctggaaagaagagaccagtagagcagtcaccccaagaaccagactcctcctcgggcatcggcaagaaaggccaacagcccgccagaaaaagactcaattttggccagactggcgactcagagtcagttccagaccctcaacctctcggagaacctccagcagcgccctctggtgtgggacctaatacaatggctgcaggcggtggcgcaccaatggcagacaataacgaaggcgccgacggagtgggtagttcctcgggaaattggcattgcgattccacatggctgggcgacagagtcatcaccaccagcacccgaacctgggccctgcccacctacaacaaccacctctacaagcaaatctccaacgggacatcgggaggagccaccaacgacaacacctacttcggctacagcaccccctgggggtattttgactttaacagattccactgccacttttcaccacgtgactggcagcgactcatcaacaacaactggggattccggcccaagagactcagcttcaagctcttcaacatccaggtcaaggaggtcacgcagaatgaaggcaccaagaccatcgccaataacctcaccagcaccatccaggtgtttacggactcggagtaccagctgccgtacgttctcggctctgcccaccagggctgcctgcctccgttcccggcggacgtgttcatgattccccagtacggctacctaacactcaacaacggtagtcaggccgtgggacgctcctccttctactgcctggaatactttccttcgcagatgctgagaaccggcaacaacttccagtttacttacaccttcgaggacgtgcctttccacagcagctacgcccacagccagagcttggaccggctgatgaatcctctgattgaccagtacctgtactacttgtctcggactcaaacaacaggaggcacggcaaatacgcagactctgggcttcagccaaggtgggcctaatacaatggccaatcaggcaaagaactggctgccaggaccctgttaccgccaacaacgcgtctcaacgacaaccgggcaaaacaacaatagcaactttgcctggactgctgggaccaaataccatctgaatggaagaaattcattggctaatcctggcatcgctatggcaacacacaaagacgacgaggagcgttttttcccagtaacgggatcctgtttttggcaacaaaatgctgccagagacaatgcggattacagcgatgtcatgctcaccagcgaggaagaaatcaaaaccactaaccctgtggctacagaggaatacggtatcgtggcagataacttgcagcagcaaaacacggctcctcaaattggaactgtcaacagccagggggccttacccggtatggtctggcagaaccgggacgtgtacctgcagggtcccatctgggccaagattcctcacacggacggcaacttccacccgtctccgctgatgggcggctttggcctgaaacatcctccgcctcagatcctgatcaagaacacgcctgtacctgcggatcctccgaccaccttcaaccagtcaaagctgaactctttcatcacgcaatacagcaccggacaggtcagcgtggaaattgaatgggagctacagaaggaaaacagcaagcgctggaaccccgagatccagtacacctccaactactacaaatctacaagtgtggactttgctgttaatacagaaggcgtgtactctgaaccccgccccattggcacccgttacctcacccgtaatctgtaa

SEQ ID NO: 466 - protein, 736 aa, Adeno-associated virus
MAADGYLPDWLEDNLSEGIREWWDLKPGAPKPKANQQKQDDGRGLVLPGYKYLGPFNGLDKGEPVNAADAAALEHDKAYDQQLEAGDNPYLRYNHADAEFQERLQEDTSFGGNLGRAVFQAKKRVLEPLGLVEEGAKTAPGKKRPVEQSPQEPDSSSGIGKKGQQPARKRLNFGQTGDSESVPDPQPLGEPPAAPSGVGPNTMAAGGGAPMADNNEGADGVGSSSGNWHCDSTWLGDRVITTSTRTWALPTYNNHLYKQISNGTSGGATNDNTYFGYSTPWGYFDFNRFHCHFSPRDWQRLINNNWGFRPKRLSFKLFNIQVKEVTQNEGTKTIANNLTSTIQVFTDSEYQLPYVLGSAHQGCLPPFPADVFMIPQYGYLTLNNGSQAVGRSSFYCLEYFPSQMLRTGNNFQFTYTFEDVPFHSSYAHSQSLDRLMNPLIDQYLYYLSRTQTTGGTANTQTLGFSQGGPNTMANQAKNWLPGPCYRQQRVSTTTGQNNNSNFAWTAGTKYHLNGRNSLANPGIAMATHKDDEERFFPVTGSCFWQQNAARDNADYSDVMLTSEEEIKTTNPVATEEYGIVADNLQQQNTAPQIGTVNSQGALPGMVWQNRDVYLQGPIWAKIPHTDGNFHPSPLMGGFGLKHPPPQILIKNTPVPADPPTTFNQSKLNSFITQYSTGQVSVEIEWELQKENSKRWNPEIQYTSNYYKSTSVDFAVNTEGVYSEPRPIGTRYLTRNL

SEQ ID NO: 467 - DNA, 2214 bp, Adeno-associated virus
atggctgctgacggttatcttccagattggctcgaggacaacctctctgagggcattcgcgagtggtgggacctgaaacctggagcccccaagcccaaggccaaccagcagaagcaggacgacggccggggtctggtgcttcctggctacaagtacctcggacccttcaacggactcgacaagggggagcccgtcagcgcggcggacgcagcggccctcgagcacgacaaggcctgcgaccagcggctcaaagcgggtgacaatccgtacctgcggtataaccacgccgacgccgagtttcaggagcgtctgcaagaagatacgtcttttgggggcaacctcgggcgagcagtcttccaggccaagaagcgggttctcgaacctctcggtctggttgaggaagctgctaagacggctcctggaaagaagggaccggtagaaccgtcacctcagcgttcccccgactcctccacgggcatcggcaagaaaggccagcagcccgctagaaagagactgaactttgggcagactggcgactcagagtcagtccccgaccctcaaccaatcggagaaccaccagcaggcccctctggtctgggatctggtacaatggctgcaggcggtggcgcaccaatggctgacaataacgagggcgccgacggagtgggtaatgcctcaggaaattggcattgcgattccacatggctgggcgacagagtcatcaccaccagcacccgaacctgggctttgcccacctacaacaatcacctctacaagcaaatctccagtcagtcagcaggtagcaccaacgacaacgtctacttcggctacagcaccccctgggggtattttgacttcaacagattccactgtcacttctcaccacgtgactggcagcggctcatcaacaacaactggggattccggcccaagaagctcaacttcaagctgttcaacatccaggtcaaggaggtcacaacgaatgacggcgtcacgaccatcgccaataaccttaccagcacggttcaggtcttttcggactcggaataccagctgccctacgtcctcggctccgcacaccagggctgcctgcctccgttcccggcggacgtcttcatgattccccagtacggctacctgactctgaacaatggcagccaatcggtgggtcgttcctctttctactgcctggaatatttcccttctcaaatgctgagaacgggcaacaacttcaccttcagctacaccttcgaggacgttcccttccacagcagctacgcacacagccagagcctggaccggctgatgaatcctcttatcgaccagtacctgtattacctggccagaacacagagcaacgcaggaggcacagctggcaatcgggaactgcagttttatcagggcgggcctaccaccatggccgaacaagccaaaaactggctgcctggaccttgcttccggcaacaaagagtctccaagacgctggatcaaaacaacaacagcaactttgcttggactggtgccaccaaataccatctaaatggaagaaattcattggttaatcccggtgtcgccatggcaacccacaaggacgacgaggaacgcttcttcccttcgagcggagtcctgatttttggaaaaactggagcagctaataagactacactggaaaatgtgttaatgacaaatgaagaggaaattcgtcctaccaacccggtagccaccgaggaatacgggactgttagcagcaacctgcaggcggctaacactgcagcccagacacaagttgtcaacaaccagggagccttacctggtatggtctggcagaaccgggacgtgtacctgcagggtcccatctgggccaagattcctcacacggacggcaactttcacccgtctccgctgatgggcggctttggactgaagcatccgcctcctcagatcctgatcaaaaacactcctgttcctgctaatcccccggaggtgtttacgcctgccaagtttgcttctttcatcacacagtacagcaccggccaggtcagcgtggagatcgagtgggagctgcagaaggagaacagcaagcgctggaacccagagattcagtatacctccaattttgacgaacagactggtgtggactttgccgttgacagccagggtgtttattctgagcctcgccccattggtactcgttacctcacccgtaatctgtaa

SEQ ID NO: 468 - protein, 737 aa, Adeno-associated virus
MAADGYLPDWLEDNLSEGIREWWDLKPGAPKPKANQQKQDDGRGLVLPGYKYLGPFNGLDKGEPVSAADAAALEHDKACDQRLKAGDNPYLRYNHADAEFQERLQEDTSFGGNLGRAVFQAKKRVLEPLGLVEEAAKTAPGKKGPVEPSPQRSPDSSTGIGKKGQQPARKRLNFGQTGDSESVPDPQPIGEPPAGPSGLGSGTMAAGGGAPMADNNEGADGVGNASGNWHCDSTWLGDRVITTSTRTWALPTYNNHLYKQISSQSAGSTNDNVYFGYSTPWGYFDFNRFHCHFSPRDWQRLINNNWGFRPKKLNFKLFNIQVKEVTTNDGVTTIANNLTSTVQVFSDSEYQLPYVLGSAHQGCLPPFPADVFMIPQYGYLTLNNGSQSVGRSSFYCLEYFPSQMLRTGNNFTFSYTFEDVPFHSSYAHSQSLDRLMNPLIDQYLYYLARTQSNAGGTAGNRELQFYQGGPTTMAEQAKNWLPGPCFRQQRVSKTLDQNNNSNFAWTGATKYHLNGRNSLVNPGVAMATHKDDEERFFPSSGVLIFGKTGAANKTTLENVLMTNEEEIRPTNPVATEEYGTVSSNLQAANTAAQTQVVNNQGALPGMVWQNRDVYLQGPIWAKIPHTDGNFHPSPLMGGFGLKHPPPQILIKNTPVPANPPEVFTPAKFASFITQYSTGQVSVEIEWELQKENSKRWNPEIQYTSNFDEQTGVDFAVDSQGVYSEPRPIGTRYLTRNL

SEQ ID NO: 469 - DNA, 2214 bp, Adeno-associated virus
atggctgccgatggttatcttccagattggctcgaggacaacctctctgagggcattcgcgagtggtgggacctgaaacctggagccccgaaacccaaagccaaccagcaaaagcaggacgacggccggggtctggtgcttcctggctacaagtacctcggacccttcaacggactcgacaagggggagcccgtcaacgcggcggacgcagcggccctcgagcacgacaaggcctacgaccagcagctcaaagcgggtgacaatccgtacctgcggtataaccacgccgacgccgagtttcaggagcgtctgcaagaagatacgtcttttgggggcaacctcgggcgagcagtcttccaggccaagaagcgggttctcgaacctctcggtctggttgaggaagctgctaagacggctcctggaaagaagagaccggtagaaccgtcacctcagcgttcccccgactcctccacgggcatcggcaagaaaggccagcagcccgctagaaagagactgaactttgggcagactggcgactcagagtcagtccccgaccctcaaccaatcggagaaccaccagcaggcccctctggtctgggatctggtacaatggctgcaggcggtggcgctccaatggcagacaataacgaaggcgccgacggagtgggtaatgcctcaggaaattggcattgcgattccacatggctgggcgacagagtcatcaccaccagcacccgaacctgggctttgcccacctacaacaaccacctctacaagcaaatctccagtcagtcagcaggtagcaccaacgacaacgtctacttcggctacagcaccccctgggggtattttgacttcaacagattccactgtcacttctcaccacgtgactggcagcggctcatcaacaacaactggggattccggcccaagaagctcaacttcaagctgttcaacatccaggtcaaggaggtcacaacgaatgacggcgtcacgaccatcgccaataaccttaccagcacggttcaggtcttttcggactcggaataccagctgccctacgtcctcggctccgcacaccagggctgcctgcctccgttcccggcggacgtcttcatgattcctcagtacggctacctgactctcaacaacggtagtcaggccgtgggacgttcctccttctactgcctggagtacttcccctctcagatgctgagaacgggcaacaacttttccttcagctacactttcgaggacgtgcctttccacagcagctacgcgcacagccagagtttggacaggctgatgaatcctctcatcgaccagtacctgtactacctgtcaagaacccagtctacgggaggcacagcgggaacccagcagttgctgttttctcaggccgggcctagcaacatgtcgactcaggccagaaactggctgcctggaccctgctacagacagcagcgcgtctccacgacactgtcgcaaaacaacaacagcaactttgcctggactggtgccaccaagtatcatctgaacggcagagactctctggtgaatccgggcgtcgccatggcaaccaacaaggacgacgaggaccgcttcttcccatccagcggcatcctcatgtttggcaagcagggagctggaaaagacaacgtggactatagcaacgtgatgctaaccagcgaggaagaaatcaagaccaccaaccccgtggccacagaacagtatggcgtggtggctgataacctacagcagcaaaacaccgctcctattgtgggggccgtcaacagccagggagccttacctggcatggtctggcagaaccgggacgtgtacctgcagggtcctatttgggccaagattcctcacacagatggcaactttcacccgtctcctttaatgggcggctttggacttaaacatccgcctcctcagatccttatcaaaaacactcctgttcctgcggatcctccaacagcgttcaaccaggccaagctgaattctttcatcacgcagtacagcaccggacaagtcagcgtggagatcgagtgggagctgcagaaggagaacagcaagcgctggaacccagagattcagtatacttccaactactacaaatctacaaatgtggactttgctgttaatactgagggtgcttactctgagcctcgccccattggcactcgttacctcacccgtaatctgtaa

SEQ ID NO: 470 - protein, 737 aa, Adeno-associated virus
MAADGYLPDWLEDNLSEGIREWWDLKPGAPKPKANQQKQDDGRGLVLPGYKYLGPFNGLDKGEPVNAADAAALEHDKAYDQQLKAGDNPYLRYNHADAEFQERLQEDTSFGGNLGRAVFQAKKRVLEPLGLVEEAAKTAPGKKRPVEPSPQRSPDSSTGIGKKGQQPARKRLNFGQTGDSESVPDPQPIGEPPAGPSGLGSGTMAAGGGAPMADNNEGADGVGNASGNWHCDSTWLGDRVITTSTRTWALPTYNNHLYKQISSQSAGSTNDNVYFGYSTPWGYFDFNRFHCHFSPRDWQRLINNNWGFRPKKLNFKLFNIQVKEVTTNDGVTTIANNLTSTVQVFSDSEYQLPYVLGSAHQGCLPPFPADVFMIPQYGYLTLNNGSQAVGRSSFYCLEYFPSQMLRTGNNFSFSYTFEDVPFHSSYAHSQSLDRLMNPLIDQYLYYLSRTQSTGGTAGTQQLLFSQAGPSNMSTQARNWLPGPCYRQQRVSTTLSQNNNSNFAWTGATKYHLNGRDSLVNPGVAMATNKDDEDRFFPSSGILMFGKQGAGKDNVDYSNVMLTSEEEIKTTNPVATEQYGVVADNLQQQNTAPIVGAVNSQGALPGMVWQNRDVYLQGPIWAKIPHTDGNFHPSPLMGGFGLKHPPPQILIKNTPVPADPPTAFNQAKLNSFITQYSTGQVSVEIEWELQKENSKRWNPEIQYTSNYYKSTNVDFAVNTEGAYSEPRPIGTRYLTRNL

SEQ ID NO: 471 - DNA, 2217 bp, Adeno-associated virus
atggctgccgatggttatcttccagattggctcgaggacaacctctctgagggcattcgcgagtggtgggacctgaaacctggagccccgaaacccaaagccaaccagcaaaagcaggacgacggccggggtctggtgcttcctggctacaagtacctcggacccttcaacggactcgacaagggggagcccgtcaacgcggcggacgcagcggccctcgagcacgacaaggcctacgaccagcagctcaaagcgggtgacaatccgtacctgcggtataatcacgccgacgccgagtttcaggagcgtctgcaagaagatacgtcttttgggggcaacctcgggcgagcagtcttccaggccaagaagcgggttctcgaacctctcggtctggttgaggaaggcgctaagacggctcctggaaagaagagaccggtagagccgtcaccacagcgttcccccgactcctccacgggcatcggcaagaaaggccagcagcccgccagaaagagactcaatttcggtcagactggcgactcagagtcagtccccgaccctcaacctatcggagaacctccagcagcgccctctagtgtgggatctggtacaatggctgcaggcggtggcgcaccaatggcagacaataacgaaggtgccgacggagtgggtagttcctcgggaaattggcattgcgattccacatggctgggcgacagagtcatcaccaccagcacccgaacctgggccctgcccacctacaacaaccacctctacaagcaaatctccaacgggacctcgggaggcagcaccaacgacaacacctactttggctacagcaccccctgggggtattttgactttaacagattccactgccacttctcaccacgtgactggcagcgactcatcaacaacaactggggattccggcccaagagactcagcttcaagctcttcaacatccaggtcaaagaggtcacgcagaatgaaggcaccaagaccatcgccaataacctcaccagcaccatccaggtgtttacggactcggaataccagctgccgtacgtcctcggctctgcccaccagggctgcctgcctccgttcccggcggacgtcttcatgattcctcagtacggctacctgactctcaacaacggtagtcaggccgtgggacgttcctccttctactgcctggagtacttcccctctcagatgctgagaacgggcaacaacttttccttcagctacactttcgaggacgtgcctttccacagcagctacgcgcacagccagagtttggacaggctgatgaatcctctcatcgaccagtacctgtactacctgtcaagaacccagtctacgggaggcacagcgggaacccagcagttgctgttttctcaggccgggcctagcaacatgtcggctcaggccagaaactggctgcctggaccctgctacagacagcagcgcgtctccacgacactgtcgcaaaacaacaacagcaactttgcctggactggtgccaccaagtatcatctgaacggcagagactctctggtgaatccgggcgtcgccatggcaaccaacaaggacgacgaggaccgcttcttcccatccagcggcatcctcatgtttggcaagcagggagctggaaaagacaacgtggactatagcaacgtgatgctaaccagcgaggaagaaatcaaggccaccaaccccgtggccacagaacagtatggcgtggtggctgataacctacagcagcaaaacaccgctcctattgtgggggccgtcaacagccagggagccttacctggcatggtctggcagaaccgggacgtgtacctgcagggtcctatttgggccaagattcctcacacagatggcaactttcacccgtctcctttaatgggcggctttggacttaaacatccgcctcctcagatcctcatcaaaaacactcctgttcctgcggatcctccaacagcgttcaaccaggccaagctgaattctttcatcacgcagtacagcaccggacaagtcagcgtggagatcgagtgggagctgcagaaggagaacagcaagcgctggaacccagagattcagtatacttccaactactacaaatctacaaatgtggactttgctgttaatactgagggtgtttactctgagcctcgccccattggcactcgttacctcacccgtaatctgtaa

SEQ ID NO: 472 - protein, 738 aa, Adeno-associated virus
MAADGYLPDWLEDNLSEGIREWWDLKPGAPKPKANQQKQDDGRGLVLPGYKYLGPFNGLDKGEPVNAADAAALEHDKAYDQQLKAGDNPYLRYNHADAEFQERLQEDTSFGGNLGRAVFQAKKRVLEPLGLVEEGAKTAPGKKRPVEPSPQRSPDSSTGIGKKGQQPARKRLNFGQTGDSESVPDPQPIGEPPAAPSSVGSGTMAAGGGAPMADNNEGADGVGSSSGNWHCDSTWLGDRVITTSTRTWALPTYNNHLYKQISNGTSGGSTNDNTYFGYSTPWGYFDFNRFHCHFSPRDWQRLINNNWGFRPKRLSFKLFNIQVKEVTQNEGTKTIANNLTSTIQVFTDSEYQLPYVLGSAHQGCLPPFPADVFMIPQYGYLTLNNGSQAVGRSSFYCLEYFPSQMLRTGNNFSFSYTFEDVPFHSSYAHSQSLDRLMNPLIDQYLYYLSRTQSTGGTAGTQQLLFSQAGPSNMSAQARNWLPGPCYRQQRVSTTLSQNNNSNFAWTGATKYHLNGRDSLVNPGVAMATNKDDEDRFFPSSGILMFGKQGAGKDNVDYSNVMLTSEEEIKATNPVATEQYGVVADNLQQQNTAPIVGAVNSQGALPGMVWQNRDVYLQGPIWAKIPHTDGNFHPSPLMGGFGLKHPPPQILIKNTPVPADPPTAFNQAKLNSFITQYSTGQVSVEIEWELQKENSKRWNPEIQYTSNYYKSTNVDFAVNTEGVYSEPRPIGTRYLTRNL

SEQ ID NO: 473 - DNA, 2217 bp, Adeno-associated virus
atggctgccgatggttatcttccagattggctcgaggacaacctctctgagggcattcgcgagtggtgggacctgaaacctggagccccgaaacccaaagccaaccagcaaaagcaggacgacggccggggtctggtgcttcctggctacaagcacctcggacccttcaacggactcgacaagggggagcccgtcaacgcggcggacgcagcggccctcgagcacgacaaggcctacgaccagcagctcaaagcgggtgacaatccgtacctgcggtataatcacgctgacgccgagtttcaggagcgtctgcaagaagatacgtcttttgggggcaacctcgggcgagcagtcttccaggccaagaagcgggttctcgaacctctcggtctggttgaggaaggcgctaagacggctcctggaaagaagagaccggtagagccgtcaccacagcgttcccccgactcctccacgggcatcggcaagaaaggccagcagcccgccagaaagagactcaatttcggtcagactggcgactcagagtcagtccccgaccctcaacctatcggagaacctccagcagcgccctctagtgtgggatctggtacaatggctgcaggcggtggcgcaccaatggcagacaataacgaaggtgccgacggagtgggtagttcctcgggaaattggcattgcgattccacatggctgggcgacagagtcatcaccaccagcacccgaacctgggccctgcccacctacaacaaccacctctacaagcaaatctccaacgggacctcgggaggcagcaccaacgacaacacctactttggctacagcaccccctgggggtattttgactttaacagattccactgccacttctcaccacgtgactggcagcgactcatcaacaacaactggggattccggcccaagagactcagcttcaagctcttcaacatccaggtcaaagaggtcacgcagaatgaaggcaccaagaccatcgccaataaccttaccagcacggttcaggtcttttcggactcggaataccagctgccctacgtcctcggctccgcacaccagggctgcctgcctccgttcccggcggacgtcttcatgattccccagtacggctacctgactctgaacaatggcagccaatcggtgggtcgttcctctttctactgcctggaatatttcccttctcaaatgctgagaacgggcaacaacttcaccttcagctacaccttcgaggacgttcccttccacagcagctacgcacacagccagagcctggaccggctgatgaatcctcttatcgaccagtacctgtattacctggccagaacacagagcaacgcaggaggcacagctggcaatcgggaactgcagttttatcagggcgggcctaccaccatggccgaacaagccaaaaactggctgcctggaccttgcttccggcaacaaagagtctccaagacgctggatcaaaacaacaacagcaactttgcttggactggtgccaccaaataccatctaaatggaagaaattcattggttaatcccggtgtcgccatggcaacccacaaggacgacgaggaacgcttcttcccttcgagcggagtcctgatttttggaaaaactggagcagctaataagactacactggaaaatgtgttaatgacaaatgaagaggaaattcgtcctaccaacccggtagccaccgaggaatacgggactgttagcagcaacctgcaggcggctaacactgcagcccagacacaagttgtcaacaaccagggagccttacctggtatggtctggcagaaccgggacgtgtacctgcagggtcccatctgggccaagattcctcacacggacggcaactttcacccgtctccgctgatgggcggctttggactgaagcatccgcctcctcagatcctgatcaaaaacactcctgttcctgctaatcccccggaggtgtttacgcctgccaagtttgcttctttcatcacacagtacagcaccggccaggtcagcgtggagatcgagtgggagctgcagaaggagaacagcaagcgctggaacccagagattcagtatacctccaattttgacaaacagactggtgtggactttgccgttgacagccagggtgtttattctgagcctcgccccattggtactcgttacctcacccgtaatctgtaa

SEQ ID NO: 474 - protein, 738 aa, Adeno-associated virus
MAADGYLPDWLEDNLSEGIREWWDLKPGAPKPKANQQKQDDGRGLVLPGYKHLGPFNGLDKGEPVNAADAAALEHDKAYDQQLKAGDNPYLRYNHADAEFQERLQEDTSFGGNLGRAVFQAKKRVLEPLGLVEEGAKTAPGKKRPVEPSPQRSPDSSTGIGKKGQQPARKRLNFGQTGDSESVPDPQPIGEPPAAPSSVGSGTMAAGGGAPMADNNEGADGVGSSSGNWHCDSTWLGDRVITTSTRTWALPTYNNHLYKQISNGTSGGSTNDNTYFGYSTPWGYFDFNRFHCHFSPRDWQRLINNNWGFRPKRLSFKLFNIQVKEVTQNEGTKTIANNLTSTVQVFSDSEYQLPYVLGSAHQGCLPPFPADVFMIPQYGYLTLNNGSQSVGRSSFYCLEYFPSQMLRTGNNFTFSYTFEDVPFHSSYAHSQSLDRLMNPLIDQYLYYLARTQSNAGGTAGNRELQFYQGGPTTMAEQAKNWLPGPCFRQQRVSKTLDQNNNSNFAWTGATKYHLNGRNSLVNPGVAMATHKDDEERFFPSSGVLIFGKTGAANKTTLENVLMTNEEEIRPTNPVATEEYGTVSSNLQAANTAAQTQVVNNQGALPGMVWQNRDVYLQGPIWAKIPHTDGNFHPSPLMGGFGLKHPPPQILIKNTPVPANPPEVFTPAKFASFITQYSTGQVSVEIEWELQKENSKRWNPEIQYTSNFDKQTGVDFAVDSQGVYSEPRPIGTRYLTRNL

SEQ ID NO: 475 - protein, 737 aa, Adeno-associated virus
MAADGYLPDWLEDNLSEGIREWWDLKPGAPKPKANQQKQDDGRGLVLPGYKYLGPFNGLDKGEPVNAADAAALEHDKAYDQQLKAGDNPYLRYNHADAEFQERLQEDTSFGGNLGRAVFQAKKRVLEPLGLVEEAAKTAPGKKRPVEPSPQRSPDSSTGIGKKGQQPARKRLNFGQTGDSESVPDPQPIGEPPAGPSGLGSGTMAAGGGAPMADNNKGADGVGNASGNWHCDSTWLGDRVITTSTRTWALPTYNNHLYKQISSQSAGSTNDNVYFGYSTPWGYFDFNRFHCHFSPRDWQRLINSNWGFRPKKLNFKLFNIQVKEVTTNDGVTTIANNLTSTVQVFSDSEYQLPYVLGSAHQGCLPPFPADVFMIPQYGYLTLNNGSQSVGRSSFYCLEYFPSQMLRTGNNFTFSYTFEDVPFHSSYAHSQSLDRLMNPLIDQYLYYLARTQSNAGGTAGNRELQFYQGGPTTMAEQAKNWLPGPCFRQQRVSKTLDQNNNSNFAWTGATKYHLNGRNSLVNPGVAMATHKDDEERFFPSSGVLIFGKTGAANKTTLENVLMTNEEEIRPTNPVATEEYGTVSSNLQAANTAAQTQVVNNQGALPGMVWQNRDVYLQGPIWAKIPHTDGNFHPSPLMGGFGLKHPPPQILIKNTPVPANPPEVFTPAKFASFITQYSTGQVSVEIEWELQKENSKRWNPEIQYTSNFDKQTGVDFAVDSQGVYSEPRPIGTRYLTRNL

SEQ ID NO: 476 - protein, 737 aa, Adeno-associated virus
MAADGYLPDWLEDNLSEGIREWWDLKPGAPKPKANQQKQDDGRGLVLPGYKYLGPFNGLDKGEPVNAADAAALEHDKAYDQQLKAGDNPYLRYNHADAEFQERLQEDTSFGGNLGRAVFQAKKRVLEPLGLVEEAAKTAPGKKRPVEPSPQRSPDSSTGIGKKGQQPARKRLNFGQTGDSESVPDPQPIGEPPAGPSGLGSGTMAAGGGAPMADNNEGADGVGNASGNWHCDSTWLGDRVITTSTRTWALPTYNNHLYKQISSQSAGSTNDNVYFGYSTPWGYFDFNRFHCHFSPRDWQRLINSNWGFRPKKLNFKLFNIQVKEVTTNDGVTTIANNLTSTVQVFSDSEYQLPYVLGSAHQGCLPPFPADVFMIPQYGYLTLNNGSQSVGRSSFYCLEYFPSQMLRTGNNFTFSYTFEDVPFHSSYAHSQSLDRLMNPLIDQYLYYLARTQSNAGGTAGNRELQFYQGGPTTMAEQAKNWLPGPCFRQQRVSKTLDQNNNSNFAWTGATKYHLNGRNSLVNPGVAMATHKDDEERFFPSSGVLIFGKTGAANKTTLENVLMTNEEEIRPTNPVATEEYGTVSSNLQAANTAAQTQVVNNQGALPGMVWQNRDVYLQGPIWAKIPHTDGNFHPSPLMGGFGLKHPPPQILIKNTPVPANPPEVFTPAKFASFITQYSTGQVSVEIEWELQKENSKRWNPEIQYTSNFDKQTGVDFAVDSQGVYSEPRPIGTRYLTRNL

SEQ ID NO: 477 - protein, 737 aa, Adeno-associated virus
MAADGYLPDWLEDNLSEGIREWWDLKPGAPKPKANQQKQDDGRGLVLPGYKYLGPFNGLDKGEPVNAADAAALEHDKAYDQQLKAGDNPYLRYNHADAEFQERLQEDTSFGGNLGRAVFQAKKRVLEPLGLVEEAAKTAPGKKRPVEPSPQRSPDSSTGIGKKGQQPARKRLNFGQTGDSESVPDPQPIGEPPAGPSGLGSGTMAAGGGAPMADNNEGADGVGNASGNWHCDSTWLGDRVITTSTRTWALPTYNNHLYKQISSQSAGSTNDNVYFGYSTPWGYFDFNRFHCHFSPRDWQRLINNNWGFRPKKLNFKLFNIQVKEVTTNDGVTTIANNLTSTVQVFSDSEYQLPYVLGSAHQGCLPPFPADVFMIPQYGYLTLNNGSQSVGRSSFYCLEYFPSQMLRTGNNFTFSYTFEDVPFHSSYAHSQSLDRLMNPLIDQYLYYLARTQSNAGGTAGNRELQFYQGGPTTMAEQAKNWLPGPCFRQQRVSKTLDQNNNSNFAWTGATKYHLNGRNSLVNPGVAMATHKDDEERFFPSSGVLIFGKTGAANKTTLENVLMTNEEEIRPTNPVATEEYGTVSSNLQAANTAAQTQVVNNQGALPGMVWQNRDVYLQGPIWAKIPHTDGNFHPSPLMGGFGLKHPPPQILIKNTPVPANPPEVFTPAKFASFITQYSTGQVSVEIEWELQKENSKRWNPEIQYTSNFDKQTGVDFAVDSQGVYSEPRPIGTRYLTRNL

SEQ ID NO: 478 - protein, 737 aa, Adeno-associated virus
MAADGYLPDWLEDNLSEGIREWWDLKPGAPKPKANQQKQDDGRGLVLPGYKYLGPFNGLDKGEPVNAADAAALEHDKAYDQQLKAGDNPYLRYNHADAEFQERLQEDTSFGGNLGRAVFQAKKRVLEPLGLVEEAAKTAPGKKRPVEPSPQRSPDSSTGIGKKGQQPARKRLNFGQTGDSESVPDPQPIGEPPAGPSGLGSGTMAAGGGAPMADNNKGADGVGNASGNWHCDSTWLGDRVITTSTRTWALPTYNNHLYKQISSQSAGSTNDNVYFGYSTPWGYFDFNRFHCHFSPRDWQRLINNNWGFRPKKLNFKLFNIQVKEVTTNDGVTTIANNLTSTVQVFSDSEYQLPYVLGSAHQGCLPPFPADVFMIPQYGYLTLNNGSQSVGRSSFYCLEYFPSQMLRTGNNFTFSYTFEDVPFHSSYAHSQSLDRLMNPLIDQYLYYLARTQSNAGGTAGNRELQFYQGGPTTMAEQAKNWLPGPCFRQQRVSKTLDQNNNSNFAWTGATKYHLNGRNSLVNPGVAMATHKDDEERFFPSSGVLIFGKTGAANKTTLENVLMTNEEEIRPTNPVATEEYGTVSSNLQAANTAAQTQVVNNQGALPGMVWQNRDVYLQGPIWAKIPHTDGNFHPSPLMGGFGLKHPPPQILIKNTPVPANPPEVFTPAKFASFITQYSTGQVSVEIEWELQKENSKRWNPEIQYTSNFDKQTGVDFAVDSQGVYSEPRPIGTRYLTRNL

SEQ ID NO: 479 - DNA, 2214 bp, Adeno-associated virus
atggctgctgacggttatcttccagattggctcgaggacaacctctctgagggcattcgcgagtggtgggacctgaaacctggagcccccaagcccaaggccaaccagcagaagcaggacgacggccggggtctggtgcttcctggctacaagtacctcggacccttcaacggactcgacaagggggagcccgtcaacgcggcggacgcagcggccctcgagcacgacaaggcctacgaccagcagctcaaagcgggtgacaatccgtacctgcggtataaccacgccgacgccgagtttcaggagcgtctgcaagaagatacgtcttttgggggcaacctcgggcgagcagtcttccaggccaagaagcgggttctcgaacctctcggtctggttgaggaagctgctaagacggctcctggaaagaagagaccggtagaaccgtcacctcagcgttcccccgactcctccacgggcatcggcaagaaaggccagcagcccgctagaaagagactgaactttgggcagactggcgactcagagtcagtccccgaccctcaaccaatcggagaaccaccagcaggcccctctggtctgggatctggtacaatggctgcaggcggtggcgcaccaatggctgacaataacaagggcgccgacggagtgggtaatgcctcaggaaattggcattgcgattccacatggctgggcgacagagtcatcaccaccagcacccgaacctgggctttgcccacctacaacaaccacctctacaagcaaatctccagtcagtcagcaggtagcaccaacgacaacgtctacttcggctacagcaccccctgggggtattttgacttcaacagattccactgtcacttctcaccacgtgactggcagcggctcatcaacagcaactggggattccggcccaagaagctcaacttcaagctgttcaacatccaggtcaaggaggtcacaacgaatgacggcgtcacgaccatcgccaataaccttaccagcacggttcaggtcttttcggactcggaataccagctgccctacgtcctcggctccgcacaccagggctgcctgcctccgttcccggcggacgtcttcatgattccccagtacggctacctgactctgaacaatggcagccaatcggtgggtcgttcctctttctactgcctggaatatttcccttctcaaatgctgagaacgggcaacaacttcaccttcagctacaccttcgaggacgttcccttccacagcagctacgcacacagccagagcctggaccggctgatgaatcctcttatcgaccagtacctgtattacctggccagaacacagagcaacgcaggaggcacagctggcaatcgggaactgcagttttatcagggcgggcctaccaccatggccgaacaagccaaaaactggctgcctggaccttgcttccggcaacaaagagtctccaagacgctggatcaaaacaacaacagcaactttgcttggactggtgccaccaaataccatctaaatggaagaaattcattggttaatcccggtgtcgccatggcaacccacaaggacgacgaggaacgcttcttcccttcgagcggagtcctgatttttggaaaaactggagcagctaataagactacactggaaaatgtgttaatgacaaatgaagaggaaattcgtcctaccaacccggtagccaccgaggaatacgggactgttagcagcaacctgcaggcggctaacactgcagcccagacacaagttgtcaacaaccagggagccttacctggtatggtctggcagaaccgggacgtgtacctgcagggtcccatctgggccaagattcctcacacggacggcaactttcacccgtctccgctgatgggcggctttggactgaagcatccgcctcctcagatcctgatcaaaaacactcctgttcctgctaatcccccggaggtgtttacgcctgccaagtttgcttctttcatcacacagtacagcaccggccaggtcagcgtggagatcgagtgggagctgcagaaggagaacagcaagcgctggaacccagagattcagtatacctccaattttgacaaacagactggtgtggactttgccgttgacagccagggtgtttattctgagcctcgccccattggtactcgttacctcacccgtaatctgtaa

SEQ ID NO: 480 - DNA, 2217 bp, Adeno-associated virus
atggctgccgatggttatcttccagattggctcgaggacaacctctctgagggcattcgcgagtggtgggacctgaaacctggagccccgaaacccaaagccaaccagcaaaagcaggacgacggccggggtctggtgcttcctggctacaagtacctcggacccttcaacggactcgacaagggggagcccgtcaacgcggcggacgcagcggccctcgagcacgacaaggcctacgaccagcagctcaaagcgggtgacaatccgcacctgcggtataatcacgccgacgccgagtttcaggagcgtctgcaagaagatacgtcttttgggggcaacctcgggcgagcagtcttccaggccaagaagcgggttctcgaacctctcggtctggttgaggaaggcgctaagacggctcctggaaagaagagaccggtagagccgtcaccacagcgttcccccgactcctccacgggcatcggcaagaaaggccagcagcccgccagaaagagactcaatttcggtcagactggcgactcagagtcagtccccgaccctcaacttatcggagaacctccagcagcgccctctagtgtgggatctggtacaatggctgcaggcggtggcgcaccaatggcagacaataacgaaggtgccgacggagtgggtagttcctcgggaaattggcattgcgattccacatggctgggcgacagagtcatcaccaccagcacccgaacctgggccctgcccacctacaacaaccacctctacaagcaaatctccaacgggacctcgggaggcagcaccaacgacaacacctactttggctacagcaccccctgggggtattttgactttaacagattccactgccacttctcaccacgtgactggcagcgactcatcaacaacaactggggattccggcccaagagactcagcttcaagctcttcaacatccaggtcaaagaggtcacgcagaatgaaggcaccaagaccatcgccaataacctcaccagcaccatccaggtgtttacggactcggagtaccagctgccgtacgtcctcggctctgcccaccagggctgcctgcctccgttcccggcggacgtcttcatgattcctcagtacggcaacctgactctcaacaacggtagtcaggccgtgggacgttcctccttctactgcctggagtacttcccctctcagatgctgagaacgggcaacaacttttccttcagctacactttcgaggacgtgcctttccacagcagctacgcgcacagccagagtttggacaggctgatgaatcctctcatcgaccagtacctgtactacctgtcaagaacccagtctacgggaggcacagcgggaacccagcagttgctgttttctcaggccgggcctagcaacatgtcggctcaggccagaaactggctgcctggaccctgctacagacagcagcgcgtctccacgacactgtcgcaaaacaacaacagcaactttgcctggactggtgccaccaagtatcatctgaacggcagagactctctggtgaatccgggcgtcgccatggcaaccaacaaggacgacgaggaccgcttcttcccatccagcggcatcctcatgtttggcaagcagggagctggaaaagacaacatgggctatagcaacgtgatgctaaccagcgaggaagaaatcaagaccaccaaccccgtggccacagaacagtatggcgtggtggctgataacctacagcagcaaaacaccgctcctattgtgggggccgtcaacagccagggagccttacctggcatggtctggcagaaccgggacgtgtacctgcagggtcctatttgggccaagattcctcacacagatggcaactttcacccgtctcctttaatgggcggctttggacttaaacatccgcctcctcagatcctcatcaaaaacactcctgttcctgcggatcctccaacagcgttcaaccaggccaagctgaattctttcatcacgcagtacggcaccggacaagtcagcgtggagatcgagtgggagctgcagaaggagaacagcaagcgctggaacccagagattcagtatacttccaactactacaaatctacaaatgtggactttgctgttaatactgagggtgtttactctgagcctcgccccattggcactcgttacctcacccgtaatctgtaa

SEQ ID NO: 481 - protein, 738 aa, Adeno-associated virus
MAADGYLPDWLEDNLSEGIREWWDLKPGAPKPKANQQKQDDGRGLVLPGYKYLGPFNGLDKGEPVNAADAAALEHDKAYDQQLKAGDNPHLRYNHADAEFQERLQEDTSFGGNLGRAVFQAKKRVLEPLGLVEEGAKTAPGKKRPVEPSPQRSPDSSTGIGKKGQQPARKRLNFGQTGDSESVPDPQLIGEPPAAPSSVGSGTMAAGGGAPMADNNEGADGVGSSSGNWHCDSTWLGDRVITTSTRTWALPTYNNHLYKQISNGTSGGSTNDNTYFGYSTPWGYFDFNRFHCHFSPRDWQRLINNNWGFRPKRLSFKLFNIQVKEVTQNEGTKTIANNLTSTIQVFTDSEYQLPYVLGSAHQGCLPPFPADVFMIPQYGNLTLNNGSQAVGRSSFYCLEYFPSQMLRTGNNFSFSYTFEDVPFHSSYAHSQSLDRLMNPLIDQYLYYLSRTQSTGGTAGTQQLLFSQAGPSNMSAQARNWLPGPCYRQQRVSTTLSQNNNSNFAWTGATKYHLNGRDSLVNPGVAMATNKDDEDRFFPSSGILMFGKQGAGKDNMGYSNVMLTSEEEIKTTNPVATEQYGVVADNLQQQNTAPIVGAVNSQGALPGMVWQNRDVYLQGPIWAKIPHTDGNFHPSPLMGGFGLKHPPPQILIKNTPVPADPPTAFNQAKLNSFITQYGTGQVSVEIEWELQKENSKRWNPEIQYTSNYYKSTNVDFAVNTEGVYSEPRPIGTRYLTRNL

SEQ ID NO: 482 - DNA, 2217 bp, Adeno-associated virus
atggctgccgatggttatcttccagattggctcgaggacaacctctctgagggcattcgcgagtggtgggacctgaaacctggagccccgaaacccaaagccaaccagcaaaagcaggacgacggccggggtctggtgcttcctggctacaagtacctcggacccttcaacggactcgacaagggggagcccgtcaacgcggcggacgcagcggccctcgagcacgacaaggcctacgaccagcagctcaaagcgggtgacaatccgtacctgcggtataatcacgccgacgccgagtttcaggagcgtctgcaagaagatacgtcttttgggggcaacctcgggcgagcagtcttccaggccaagaagcgggttctcgaacctctcggtctggttgaggaaggcgctaagacggctcctggaaagaagagaccggtagagccgtcaccacagcgttcccccgactcctccacgggcatcggcaagaaaggccagcagcccgccggaaagagactcaatttcggtcagactggcgactcagagtcagtccccgaccctcaacctatcggagaacctccagcagcgccctctagtgtgggatctggtacaatggctgcaggcggtggcgcaccaatggcagacaataacgaaggtgccgacggagtgggtagttcctcgggaaattggcattgcgattccacatggctgggcgacagagtcatcaccaccagcacccgaacctgggccctgcccacctacaacaaccacctctacaagcaaatctccaacgggacctcgggaggcagcaccaacgacaacacctactttggctacagcaccccctgggggtattttgactttaacagattccactgccacttctcaccacgtgactggcagcgactcatcaacaacaactggggattccggcccaagagactcagcttcaagctcttcaacatccaggtcaaagaggtcacgcagaatgaaggcaccaagaccatcgccaataacctcaccagcaccatccaggtgtttacggactcggaataccagctgccgtacgtcctcggctctgcccaccagggctgcctgcctccgttcccggcggacgtcttcatgattcctcagtacggctacctgactctcaacaacggtagtcaggccgtgggacgttcctccttctactgcctggagtacttcccctctcagatgctgagaacgggcaacaacttttccttcagctacactttcgaggacgtgcctttccacagcagctacgcgcacagccagagtttggacaggctgatgaatcctctcgtcgaccagtacctgtactacctgtcaagaacccagtctacgggaggcacagcgggaacccagcagttgctgttttctcaggccgggcctagcaacatgtcggctcaggccagaaactggctgcctggaccctgctacagacagcagcgcgtctccacgacactgtcgcaaaacaacaacagcaactttgcctggactggtgccaccaagtatcatctgaacggcagagactctctggtgaatccgggcgtcgccatggcaaccaacaaggacgacgaggaccgcttcttcccatccagcggcatcctcatgtttggcaagcagggagctggaaaagacaacgtggactatagcaacgtgatgctaaccagcgaggaagaaatcaagaccaccaaccccgtggccacagaacagtatggcgtggtggctgataacctacagcagcaaaacaccgctcctattgtgggggccgtcaacagccagggagccttacctggcatggtctggcagaaccgggacgtgtacctgcagggtcctatttgggccaagattcctcacacagatggcaactttcacccgtctcctttaatgggcggctttggacttaaacatccgcctcctcagatcctcatcaaaaacactcctgttcctgcggatcctccaacagcgttcaaccaggccaagctgaattctttcatcacgcagtacagcaccggacaagtcagcgtggagatcgagtgggagctgcagaaggagaacagcaagcgctggagcccagagattcagtatacttccaactactacaaatctacaaatgtggactttgctgttaatactgagggtgtttactctgagcctcgccccattggcactcgttacctcacccgtaatctgtaa

SEQ ID NO: 483 - protein, 738 aa, Adeno-associated virus
MAADGYLPDWLEDNLSEGIREWWDLKPGAPKPKANQQKQDDGRGLVLPGYKYLGPFNGLDKGEPVNAADAAALEHDKAYDQQLKAGDNPYLRYNHADAEFQERLQEDTSFGGNLGRAVFQAKKRVLEPLGLVEEGAKTAPGKKRPVEPSPQRSPDSSTGIGKKGQQPAGKRLNFGQTGDSESVPDPQPIGEPPAAPSSVGSGTMAAGGGAPMADNNEGADGVGSSSGNWHCDSTWLGDRVITTSTRTWALPTYNNHLYKQISNGTSGGSTNDNTYFGYSTPWGYFDFNRFHCHFSPRDWQRLINNNWGFRPKRLSFKLFNIQVKEVTQNEGTKTIANNLTSTIQVFTDSEYQLPYVLGSAHQGCLPPFPADVFMIPQYGYLTLNNGSQAVGRSSFYCLEYFPSQMLRTGNNFSFSYTFEDVPFHSSYAHSQSLDRLMNPLVDQYLYYLSRTQSTGGTAGTQQLLFSQAGPSNMSAQARNWLPGPCYRQQRVSTTLSQNNNSNFAWTGATKYHLNGRDSLVNPGVAMATNKDDEDRFFPSSGILMFGKQGAGKDNVDYSNVMLTSEEEIKTTNPVATEQYGVVADNLQQQNTAPIVGAVNSQGALPGMVWQNRDVYLQGPIWAKIPHTDGNFHPSPLMGGFGLKHPPPQILIKNTPVPADPPTAFNQAKLNSFITQYSTGQVSVEIEWELQKENSKRWSPEIQYTSNYYKSTNVDFAVNTEGVYSEPRPIGTRYLTRNL

SEQ ID NO: 484 - DNA, 2217 bp, Adeno-associated virus
atggttgccgatggttatcttccagattggctcgaggacaacctctctgagggcattcgcgagtggtgggacctgaaacctggagccccgaaacccaaagccaaccagcaaaagcagggcgacggccggggtctggtgcttcctggctacaagtacctcggacccttcaacggactcgacaagggggagcccgtcaacgcggcggacgcagcggccctcgagcacgacaaggcctacgaccagcagcttaaagcgggtgacaatccgtacctgcggtataatcacgccgacgccgagcttcaggagcgtctgcaagaagatacgtcttttgggggcaacctcgggcgagcagtcttccaggccaagaagcgggttctcgaacctctcggtctggttgaggaaggcgctaagacggctcctggaaagaagagaccggtagagccgtcaccacagcgttcccccgactcctccacgggcatcggcaagaaaggccagcagcccgccagaaagagactcaatttcggtcagactggcgactcagagtcagtccccgaccctcaacctatcggagaacctccagcagcgccctctagtgtgggatctggtacaatggctgcaggcggtggcgcgccaatggcagacaataacgaaggtgccgacggagtgggtagttcctcgggaaattggcattgcgattccacatggctgggcgacagagtcatcaccaccagcacccgaacctgggccctgcccacctacaacaaccacctctacaagcaaatctccaacgggacctcgggaggcagcaccaacgacaacacctactttggctacagcaccccctgggggtattttgactttaacagattccactgccacttctcaccacgtgactggcagcgactcatcaacaacaactggggattccggcccaagagactcagcttcaagctcttcaacatccaggtcaaagaggtcacgcagaatgaaggcaccaagaccatcgccaataacctcaccagcaccatccaggtgtttacggactcggaataccagctgccgtacgtcctcggctctgcccaccagggctgccagcctccgttcccggcggacgtcttcatgattcctcagtacggctacctgactctcaacaacggtagtcaggccgtgggacgttcctccttctactgcctggagtacttcccctctcagatgctgagaacgggcaacaacttttccttcagctacactttcgaggacgtgcctttccacagcagctacgcgcacagccagagtttggacaggctgatgaatcctctcatcgaccagtacctgtactacctgtcaagaacccagtctacgggaggcacagcgggaacccagcagttgctgttttctcaggccgggcctagcaacatgtcggctcaggccagaaactggctgcctggaccctgctacagacagcagcgcgtctccacgacactgtcgcaaaacaacaacagcaactttgcctggactggtgccaccaagtatcatctgaacggcagagactctctggtgaatccgggcgtcgccatggcaaccaacaaggacgacgaggaccgcttcttcccatccagcggcatcctcatgtttggcaagcagggagctggaaaagacaacgtggactatagcaacgtgatgctaaccagcgaggaagaaatcaagaccaccaaccccgtggccacagaacagtatggcgtggtggctgataacctacagcagcaaaacaccgctcctattgtgggggccgtcaacagccagggagccttacctggcatggtctggcagaaccgggacgtgtacctgcagggtcctatttgggccaagattcctcacacagatggcaactttcacccgtctcctttaatgggcggctttggacttaaacatccgcctcctcagatcctcatcaaaaacactcctgttcctgcggatcctccaacagcgttcaaccaggccaagctgaattctttcatcacgcagtacagcaccggacaagtcagcgtggagatcgagtgggagccgcagaaggagaacagcaagcgctggaacccagagattcagtatacttccaactactacaaatctacaaatgtggactttgctgttaatactgagggtgtttactctgagcctcgccccattggcactcgttacctcacccgtaatctgtaa

SEQ ID NO: 485 - protein, 738 aa, Adeno-associated virus
MVADGYLPDWLEDNLSEGIREWWDLKPGAPKPKANQQKQGDGRGLVLPGYKYLGPFNGLDKGEPVNAADAAALEHDKAYDQQLKAGDNPYLRYNHADAELQERLQEDTSFGGNLGRAVFQAKKRVLEPLGLVEEGAKTAPGKKRPVEPSPQRSPDSSTGIGKKGQQPARKRLNFGQTGDSESVPDPQPIGEPPAAPSSVGSGTMAAGGGAPMADNNEGADGVGSSSGNWHCDSTWLGDRVITTSTRTWALPTYNNHLYKQISNGTSGGSTNDNTYFGYSTPWGYFDFNRFHCHFSPRDWQRLINNNWGFRPKRLSFKLFNIQVKEVTQNEGTKTIANNLTSTIQVFTDSEYQLPYVLGSAHQGCQPPFPADVFMIPQYGYLTLNNGSQAVGRSSFYCLEYFPSQMLRTGNNFSFSYTFEDVPFHSSYAHSQSLDRLMNPLIDQYLYYLSRTQSTGGTAGTQQLLFSQAGPSNMSAQARNWLPGPCYRQQRVSTTLSQNNNSNFAWTGATKYHLNGRDSLVNPGVAMATNKDDEDRFFPSSGILMFGKQGAGKDNVDYSNVMLTSEEEIKTTNPVATEQYGVVADNLQQQNTAPIVGAVNSQGALPGMVWQNRDVYLQGPIWAKIPHTDGNFHPSPLMGGFGLKHPPPQILIKNTPVPADPPTAFNQAKLNSFITQYSTGQVSVEIEWEPQKENSKRWNPEIQYTSNYYKSTNVDFAVNTEGVYSEPRPIGTRYLTRNL

SEQ ID NO: 486 - DNA, 2217 bp, Adeno-associated virus
atggctgccgatggttatcttccagattggctcgaggacaacctctctgagggcattcgcgagtggtgggacctgaaacctggagccccgaaacccaaagccaaccagcaaaagcaggacgacggccggggtctggtgcttcctggctacaagtacctcggacccttcaacggactcgacaagggggagcccgtcaacgcggcggacgcagcggccctcgagcacgacaaggcctacgaccagcagctcaaagcgggtgacaatccgtacctgcggtataatcacgccgacgccgagtttcaggagcgtctgcaagaagatacgtcttttgggggcaacctcgggcgagcagtcttccaggccaagaagcgggttctcgaacctctcggtctggttgaggaaggcgctaagacggctcctggaaagaagagaccggtagagccgtcaccacagcgttcccccgactcctccacgggcatcggcaagaaaggccagcagcccgccagaaagagactcaatttcggtcagactggcgactcagagtcagtccccgaccctcaacctatcggagaacctccagcagcgccctctagtgtgggatctggtacaatggctgcaggcggtggcgcaccaatggcagacaataacgaaggtgccgacggagtgggtagttcctcgggaaattggcattgcgattccacatggctgggcgacagagtcatcaccaccagcacccgaacctgggccctgcccacctacaacaaccacctctacaagcaaatctccaacgggacctcgggaggcagcaccaacgacaacacctactttggctacagcaccccctgggggtattttgactttaacagattccactgccacttctcaccacgtgactggcagcgactcatcaacaacaactggggattccggcccaagagactcagcttcaagctcttcaacatccaggtcaaagaggtcacgcagaatgaaggcaccaagaccatcgccaatagcctcaccagcaccatccaggtgtttacggactcggaataccagctgccgtacgtcctcggctctgcccaccagggctgcctgcctccgttcccggcggacgtcttcatgattcctcagtacggctacctgactcccaacaacggtagtcaggccgtgggacgttcctccttctactgcctggagtacttcccctctcagatgctgagaacgggcaacaacttttccttcagctacactttcgaggacgtgcctttccacagcagctacgcgcacagccagagtttggacaggctgatgaatcctctcatcgaccagtacctgtactacctgtcaagaacccagtctacgggaggcacagcgggaacccagcagttgctgtcttctcaggccgggcctagcaacatgtcggctcaggccagaaactggctgcctggaccctgctacagacagcagcgcgtctccacgacactgtcgcaaaacaacaacagcaactttgcctggactggtgccaccaagtatcatctgaacggcagagactctctggtgaatccgggcgtcgccatggcaaccaacaaggacgacgaggaccgcttcttcccatccagcggcatcctcatgtttggcaagcagggagctggaaaagacaacgtggactatagcaacgtgatgctaaccagcgaggaagaaatcaagaccaccaaccccgtggccacagaacagtatggcgtggtggctgataacctacagcagcaaaacaccgctcctattgtgggggccgtcaacagccagggagccttacctggcatggtctggcagaaccgggacgtgtacttgcagggtcctatttgggccaagattcctcacacagatggcaactttcacccgtctcctttaatgggcggctttggacttaaacatccgcctcctcagatcctcatcaaaaacactcctgttcctgcggatcctccaacagcgttcaaccaggccaagctgaattctttcatcacgcagtacagcaccggacaagtcagcgtggagatcgagtgggagctgcagaaggagaacagcaagcgctggaacccagagattcagtatacttccaactactacaaatctacaaatgtggactttgctgttaatactgagggtgtttactctgagcctcgccccattggcactcgttacctcacccgtaatctgtaa

SEQ ID NO: 487 - protein, 738 aa, Adeno-associated virus
MAADGYLPDWLEDNLSEGIREWWDLKPGAPKPKANQQKQDDGRGLVLPGYKYLGPFNGLDKGEPVNAADAAALEHDKAYDQQLKAGDNPYLRYNHADAEFQERLQEDTSFGGNLGRAVFQAKKRVLEPLGLVEEGAKTAPGKKRPVEPSPQRSPDSSTGIGKKGQQPARKRLNFGQTGDSESVPDPQPIGEPPAAPSSVGSGTMAAGGGAPMADNNEGADGVGSSSGNWHCDSTWLGDRVITTSTRTWALPTYNNHLYKQISNGTSGGSTNDNTYFGYSTPWGYFDFNRFHCHFSPRDWQRLINNNWGFRPKRLSFKLFNIQVKEVTQNEGTKTIANSLTSTIQVFTDSEYQLPYVLGSAHQGCLPPFPADVFMIPQYGYLTPNNGSQAVGRSSFYCLEYFPSQMLRTGNNFSFSYTFEDVPFHSSYAHSQSLDRLMNPLIDQYLYYLSRTQSTGGTAGTQQLLSSQAGPSNMSAQARNWLPGPCYRQQRVSTTLSQNNNSNFAWTGATKYHLNGRDSLVNPGVAMATNKDDEDRFFPSSGILMFGKQGAGKDNVDYSNVMLTSEEEIKTTNPVATEQYGVVADNLQQQNTAPIVGAVNSQGALPGMVWQNRDVYLQGPIWAKIPHTDGNFHPSPLMGGFGLKHPPPQILIKNTPVPADPPTAFNQAKLNSFITQYSTGQVSVEIEWELQKENSKRWNPEIQYTSNYYKSTNVDFAVNTEGVYSEPRPIGTRYLTRNL

SEQ ID NO: 488 - protein, 738 aa, Adeno-associated virus
MAADGYLPDWLEDNLSEGIREWWDLKPGAPKPKANQQKQDDGRGLVLPGYKYLGPFNGLDKGEPVNAADAAALEHDKAYDQQLKAGDNPYLRYNHADAEFQERLQEDTSFGGNLGRAVFQAKKRVLEPLGLVEEGAKTAPGKKRPVEPSPQRSPDSSTGIGKKGQQPARKRLNFGQTGDSESVPDPQPIGEPPAAPSSVGSGTMAAGGGAPMADNNEGADGVGSSSGNWHCDSTWLGDRVITTSTRTWALPTYNNHLYKQISNGTSGGSTNDNTYFGYSTPWGYFDFNRFHCHFSPRDWQRLINNNWGFRPKRLSFKLFNIQVKEVTQNEGTKTIANNLTSTIQVFTDSEYQLPYVLGSAHQGCLPPFPADVFMIPQYGYLTLNNGSQAVGRSSFYCLEYFPSQMLRTGNNFSFSYTFEDVPFHSSYVHSQSLDRLMNPLIDQYLYYLSRTQSTGGTAGTQQLLFSQAGPSNMSAQARNWLPGPCYRQQRVSTTLSQNNNSNFAWTGATKYHLNGRDSLVNSGVAMATNKDDEDRFFPSSGILMFGKQGAGKDNVDYSNVMLTSEEEIKTTNPVATEQYGVVADNLQQQNTAPIVGAVNSQGALPGMVWQNRDVYLQGPIWAKIPHTDGNFHPSPLMGGFGLKHPPPQILIKNTPVPADPPTAFNQAKLNSFITQYSTGQVSVEIEWELQKENSKRWNPEIQYTSNYYKSTNVDFAVNTEGVYSEPRPIGTRYPTRNL

SEQ ID NO: 489 - DNA, 2217 bp, Adeno-associated virus
atggctgccgatggttatcttccagattggctcgaggacaacctctctgagggcattcgcgagtggtgggacctgaaacctggagccccgaaacccaaagccaaccagcaaaagcaggacgacggccggggtctggtgcttcctggctacaagtacctcggacccttcaacggactcgacaagggggagcccgtcaacgcggcggacgcagcggccctcgagcacgacaaggcctacgaccagcagctcaaagcgggtgacaatccgtacctgcggtataatcacgccgacgccgagtttcaggagcgtctgcaagaagatacgtcttttgggggcaacctcgggcgagcagtcttccaggccaagaagcgggttctcgaacctctcggtctggttgaggaaggcgctaagacggctcctggaaagaagagaccggtagagccgtcaccacagcgttcccccgactcctccacgggcatcggcaagaaaggccagcagcccgccagaaagagactcaatttcggtcagactggcgactcagagtcagtccccgaccctcaacctatcggagaacctccagcagcgccctctagtgtgggatctggtacaatggctgcaggcggtggcgcaccaatggcagacaataacgaaggtgccgacggagtgggtagttcctcgggaaattggcattgcgattccacatggctgggcgacagagtcatcaccaccagcacccgaacctgggccctgcccacctacaacaaccacctctacaagcaaatctccaacgggacctcgggaggcagcaccaacgacaacacctactttggctacagcaccccctgggggtattttgactttaacagattccactgccacttctcaccacgtgactggcagcgactcatcaacaacaactggggattccggcccaagagactcagcttcaagctcttcaacatccaggtcaaagaggtcacgcagaatgaaggcaccaagaccatcgccaataacctcaccagcaccatccaggtgtttacggactcggaataccagctgccgtacgtcctcggctctgcccaccagggctgcctgcctccgttcccggcggacgtcttcatgattcctcagtacggctacctgactctcaacaacggtagtcaggccgtgggacgttcctccttctactgcctggagtacttcccctctcagatgctgagaacgggcaacaacttttccttcagctacactttcgaggacgtgcctttccacagcagctacgtgcacagccagagtttggacaggctgatgaatcctctcatcgaccagtacctgtactacctgtcaagaacccagtctacgggaggcacagcgggaacccagcagttgctgttttctcaggccgggcctagcaacatgtcggctcaggccagaaactggctgcctggaccctgctacagacagcagcgcgtctccacgacactgtcgcaaaacaacaacagcaactttgcctggactggtgccaccaagtatcatctgaacggcagagactctctggtgaattcgggcgtcgccatggcaaccaacaaggacgacgaggaccgcttcttcccatccagcggcatcctcatgtttggcaagcagggagctggaaaagacaacgtggactatagcaacgtgatgctaaccagcgaggaagaaatcaagaccaccaaccccgtggccacagaacagtatggcgtggtggctgataacctacagcagcaaaacaccgctcctattgtgggggccgtcaacagccagggagccttacctggcatggtctggcagaaccgggacgtgtacctgcagggtcctatttgggccaagattcctcacacagatggcaactttcacccgtctcctttaatgggcggctttggacttaaacatccgcctcctcagatcctcatcaaaaacactcctgttcctgcggatcctccaacagcgttcaaccaggccaagctgaattctttcatcacgcagtacagcaccggacaagtcagcgtggagatcgagtgggagctgcagaaggagaacagcaagcgctggaacccagagattcagtatacttccaactactacaaatctacaaatgtggactttgctgttaatactgagggtgtttactctgagcctcgccccattggcactcgttaccccacccgtaatctgtaa

SEQ ID NO: 490 - protein, 734 aa, Adeno-associated virus; identical to SEQ ID NO: 315

SEQ ID NO: 491 - DNA, 2214 bp, Adeno-associated virus
atggctgctgacggttatcttccagattggctcgaggacaacctctctgagggcattcgcgagtggtgggacctgaaacctggagccccgaaacccaaagccaaccagcagaagcaggacgacggccggggtctggtgcttcctggctacaagtacctcggacccttcaacggactcgacaagggggagcccgtcaacgcggcggacgcagcggccctcgagcacgacaaggcctacgaccagcagctcaaagcgggtgacaatccgtacctgcggtataaccacgccgacgccgagtttcaggagcgtctgcaagaagatacgtcttttgggggcaacctcgggcgagcagtcttccaggccaagaagcgggttctcgaacctctcggtctggttgaggaagctgctaagacggctcctggaaagaagagaccggtagaaccgtcacctcagcgttcccccgactcctccacgggcatcggcaagaaaggccagcagcccgctagaaagagactgaactttgggcagactggcgactcagagtcagtccccgaccctcaacctctcggagaaccaccagcaggcccctctggtctgggatctggtacaatggctgcaggcggtggcgctccaatggcagacaataacgaaggcgccgacggagtgggtaatgcctcaggaaattggcattgcgattccacatggctgggcgacagagtcatcaccaccagcacccgaacctgggctttgcccacctacaacaaccacctctacaagcaaatctccagtcagtcagcaggtagcaccaacgacaacgtctacttcggctacagcaccccctgggggtattttgacttcaacagattccactgtcacttctcaccacgtgactggcagcgactcatcaacaacaactggggattccggcccaagaagctcaacttcaagctcttcaacatccaagtcaaggaggtcacgacgaatgacggcgtcacgaccatcgctaataaccttaccagcacggttcaggtcttttcggactcggagtaccagctgccgtacgtcctcggctctgcccaccagggctgcctgcctccgttcccggcggacgtcttcatgattcctcagtacggctacctgactctgaacaatggcagccaatcggtgggacgttcatccttctactgcctggaatacttcccttctcaggtgctgagaacgggtaacaacttcaccttcagttacaccttcgaggacgtgcctttccacagcagctacgcgcacagccagagcctagaccggctgatgaatcccctcatcgaccagtacctgtattacctggctagaacacagagtaacccaggaggcacatctggcaatcgggaactgcagttttaccagggcgggccttccaccatggccgaacaagccaagaactggttacctggaccttgcttccggcaacaaagagtttccaaaacactggatcaaaacaacaacagcaactttgcttggactggtgccaccaaatatcacctgaacggcagaaactcattggtgaatcctggtgtcgccatggcaactcacaaggacgacgaggaccgctttttcccatccagcggagtcctgatttttggaaaaactggagcaaccaacaagactacattggaaaacgtgttaatgacaaatgaagaagaaattcgtcctactaatcctgtggccacagaagaatacgggatagtcagcagcaatttacaagcggccaatactgcagcccagacacaagttgtcaacaaccagggagccttacctggcatggtctggcagaaccgggacgtgtacctgcagggtcccatctgggccaaaattcctcacacagacggcaactttcacccgtctccgctgatgggcggctttggactgaagcatccgcctcctcagatcctgatcaaaaacactcctgttcctgctaatcccccggaggtgtttacgcctgccaagtttgcttctttcatcacacagtacagcaccggccaggtcagcgtggagatcgagtgggagctgcagaaggagaacagcaagcgctggaacccagagattcagtatacctccaattttgacaaacagactggtgtggactttgccgttgacagccagggtgtttattctgagcctcgccccattggtactcgttacctcacccgtaatctgtaa

SEQ ID NO: 492 - protein, 737 aa, Adeno-associated virus
MAADGYLPDWLEDNLSEGIREWWDLKPGAPKPKANQQKQDDGRGLVLPGYKYLGPFNGLDKGEPVNAADAAALEHDKAYDQQLKAGDNPYLRYNHADAEFQERLQEDTSFGGNLGRAVFQAKKRVLEPLGLVEEAAKTAPGKKRPVEPSPQRSPDSSTGIGKKGQQPARKRLNFGQTGDSESVPDPQPLGEPPAGPSGLGSGTMAAGGGAPMADNNEGADGVGNASGNWHCDSTWLGDRVITTSTRTWALPTYNNHLYKQISSQSAGSTNDNVYFGYSTPWGYFDFNRFHCHFSPRDWQRLINNNWGFRPKKLNFKLFNIQVKEVTTNDGVTTIANNLTSTVQVFSDSEYQLPYVLGSAHQGCLPPFPADVFMIPQYGYLTLNNGSQSVGRSSFYCLEYFPSQVLRTGNNFTFSYTFEDVPFHSSYAHSQSLDRLMNPLIDQYLYYLARTQSNPGGTSGNRELQFYQGGPSTMAEQAKNWLPGPCFRQQRVSKTLDQNNNSNFAWTGATKYHLNGRNSLVNPGVAMATHKDDEDRFFPSSGVLIFGKTGATNKTTLENVLMTNEEEIRPTNPVATEEYGIVSSNLQAANTAAQTQVVNNQGALPGMVWQNRDVYLQGPIWAKIPHTDGNFHPSPLMGGFGLKHPPPQILIKNTPVPANPPEVFTPAKFASFITQYSTGQVSVEIEWELQKENSKRWNPEIQYTSNFDKQTGVDFAVDSQGVYSEPRPIGTRYLTRNL

SEQ ID NO: 493 - DNA, 2214 bp, Adeno-associated virus
atggctgccgatggttatcttccagattggctcgaggacaacctctctgagggcattcgcgagtggtgggacctgaaacctggagccccgaaacccaaagccaaccagcaaaagcaggacgacggccggggtctggtgcttcctggctacaagtacctcggacccttcaacggactcgacaagggggagcccgtcaacgcggcggacgcagcggccctcgagcacgacaaggcctacgaccagcagctcaaagcgggtgacaatccgtacctgcggtataatcacgccgacgccgagtttcaggagcgtctgcaagaagatacgtcttttgggggcaacctcgggcgagcagtcttccaggccaagaagcgggttctcgaacctctcggtctggttgaggaaggcgctaagacggctcctggaaagaagagaccggtagagccgtcaccacagcgttcccccgactcctccacgggcatcggcaagaaaggccagcagcccgccagaaagagactcaatttcggtcagactggcgactcagagtcagtccccgaccctcaacctatcggagaacctccagcagcgccctctagtgtgggatctggtacaatggctgcaggcggtggcgcaccaatggcagacaataacgaaggtgccgacggagtgggtagttcctcgggaaattggcattgcgattccacacggctgggcgacagagtcatcaccaccagcacccggacctgggctttgcccacctacaacaaccacctctacaagcaaatctccagtcagtcagcaggtagcaccaacgacaacgtctacttcggctacagcaccccctgggggtattttgacttcaacagattccactgtcacttctcaccacgtgactggcagcggctcatcaacaacaactggggattccggcccaagaagctcaacttcaagctgttcaacatccaggtcaaggaggtcacaacgaatgacggcgtcacgaccatcgccaataaccttaccagcacggttcaggtcttttcggactcggaataccagctgccctacgtcctcggctccgcacaccagggctgcctgcctccgttcccggcggacgtcttcatgattccccagtacggctacctgactctgaacaatggcagccaatcggtgggtcgttcctctttctactgcctggaatatttcccttctcaaatgctgagaacgggcaacaacttcaccttcagctacaccttcgaggacgttcccttccacagcagctacgcacacagccagagcctggaccggctgatgaatcctcttatcgaccagtacctgtattacctggccagaacacagagcaacgcaggaggcacagctggcaatcgggaactgcagttttatcagggcgggcctaccaccatggccgaacaagccaaaaactggctgcctggaccttgcttccggcaacgaagagtctccaagacgctggatcaaaacaacaacagcaactttgcttggactggtgccaccaaataccatctaaatggaagaaattcattggttaatcccggtgtcgccatggcaacccacaaggacgacgaggaacgcttcttcccttcgagcggagtcctgatttttggaaaaactggagcagctaataagactacactggaaaatgtgttaatgacaaatgaagaggaaattcgtcctaccaacccggtagccaccgaggaatacgggactgttagcagcaacctgcaggcggctaacactgcagcccagacacaagttgtcaacaaccagggagccttacctggtatggtctggcagaaccgggacgtgtacctgcagggtcccatctgggccaagattcctcacacggacggcaactttcacccgtctccgctgatgggcggctttggactgaagcatccgcctcctcagatcctgatcaaaaacactcctgttcctgctaatcccccggaggtgtttacgcctgccaagtttgcttctttcatcacacagtacagcaccggccaggtcagcgtggagatcgagtgggagctgcagaaggagaacagcaagcgctggaacccagagattcagtatacctccaattttgacaaacagactggtgtggactttgccgttgacagccagggtgtttattctgagcctcgccccattggtactcgttacctcacccgtaatctgtaa

SEQ ID NO: 494 - protein, 737 aa, Adeno-associated virus
MAADGYLPDWLEDNLSEGIREWWDLKPGAPKPKANQQKQDDGRGLVLPGYKYLGPFNGLDKGEPVNAADAAALEHDKAYDQQLKAGDNPYLRYNHADAEFQERLQEDTSFGGNLGRAVFQAKKRVLEPLGLVEEGAKTAPGKKRPVEPSPQRSPDSSTGIGKKGQQPARKRLNFGQTGDSESVPDPQPIGEPPAAPSSVGSGTMAAGGGAPMADNNEGADGVGSSSGNWHCDSTRLGDRVITTSTRTWALPTYNNHLYKQISSQSAGSTNDNVYFGYSTPWGYFDFNRFHCHFSPRDWQRLINNNWGFRPKKLNFKLFNIQVKEVTTNDGVTTIANNLTSTVQVFSDSEYQLPYVLGSAHQGCLPPFPADVFMIPQYGYLTLNNGSQSVGRSSFYCLEYFPSQMLRTGNNFTFSYTFEDVPFHSSYAHSQSLDRLMNPLIDQYLYYLARTQSNAGGTAGNRELQFYQGGPTTMAEQAKNWLPGPCFRQRRVSKTLDQNNNSNFAWTGATKYHLNGRNSLVNPGVAMATHKDDEERFFPSSGVLIFGKTGAANKTTLENVLMTNEEEIRPTNPVATEEYGTVSSNLQAANTAAQTQVVNNQGALPGMVWQNRDVYLQGPIWAKIPHTDGNFHPSPLMGGFGLKHPPPQILIKNTPVPANPPEVFTPAKFASFITQYSTGQVSVEIEWELQKENSKRWNPEIQYTSNFDKQTGVDFAVDSQGVYSEPRPIGTRYLTRNL

SEQ ID NO: 495 - DNA, 2208 bp, Adeno-associated virus
atggctgccgatggttatcttccagattggctcgaggacactctctctgaaggaataagacagtggtggaagctcaaacctggcccaccaccaccaaagcccgcagagcggcataaggacgacagcaggggtcttgtgcttcctgggtacaagtacctcggacccttcaacggactcgacaagggggagccggtcaacgaggcagacgccgcggccctcgagcacgacaaggcctacgaccggcagctcgacagcggagacaacccgtacctcaagtacaaccacgccgacgcggagtttcaggagcgtcttaaagaagatacgtcttttgggggcaacctcggacgagcagtcttccaggcgaaaaagagggttcttgaacctctgggcctggttgaggaacctgttaagacggctccgggaaaaaagaggccggtagagcactctcctgcggagccagactcctcctcgggaaccggaaaagcgggccagcagcctgcaagaaaaagattgaattttggtcagactggagacgcagactccgtacctgacccccagcctctcggacagccaccagcagccccctctggtttgggatctactacaatggctacaggcagtggcgcaccaatggcagacaataacgagggtgccgatggagtgggtaattcttcaggaaattggcattgcgattcccaatggctgggcgacagagtcatcaccaccagcacccgaacctgggcccagcccacctacaacaaccacctctacaagcaaatctcaagccaatcaggagcctcaaacgacaaccactactttggctacagcaccccttgggggtattttgacttcaacagattccactgccacttttcaccacgtgactggcaaagactcatcaacaacaactggggattccgacccaagagactcaacttcaagctctttaacattcaagtcaaagaggtcacgcagaatgacggtacgacgacgattgccaataaccttaccagcacggttcaggtgtttactgactcggagtaccagctcccgtacgtcctcgggtcggcgcatcaaggatgcctcccgccgtttccagcggacgtcttcatggtcccacagtatggatacctcaccctgaacaacgggagtcaggcggtaggacgctcttccttttactgcctggagtactttccttctcagatgcttcgtactggaaacaactttcagttcagctacacctttgaagacgttcctttccacagcagctacgctcacagccagagtctggatcggctgatgaatcctctgatcgaccagtacctgtattatctgaacaaaacacaatcaaatagtggagctcttcagcagtctcggctactgtttagtcaagctggacccaccagcatgtctcttcaagctaaaaactggctacctggaccttgctacagacagcagcgtctgtcaaagcaggcaaacgacaacaacaacagcaactttccctggactgcggctacaaagtaccacctaaatggccgggactcgttggttaatccaggaccagctatggccagtcacaaagacgatgaagaaaagtttttccccatgcatggaaccctgatatttggtaaacaaggaacaaatgctaacgacgcggatttggacaatgtcatgattacagatgaagaagaaatccgcaccaccaatcccgtggctacggagcagtacggatatgtgtcaaataatttgcaaaactcaaatactggtccaactactggaactgtcaatcaccgaggagcgttacctggcatggtgtggcaggatcgagacgtgtacctgcagggacccatttgggccaagattcctcacaccgatggacactttcatccttctccactgatgggaggttttgggctcaaacacccgcctcctcagatcatgatcaaaaacactcccgttccagccaatcctcccacaaacttcagttctgccaagtttgcttctttcatcacacagtattccacggggcaggtcagcgtggagatcgagtgggagctgcagaaagagaacagcaaacgctggaatcccgaaattcagtacacttccaactacaacaaatctgttaatgtggactttactgtggacactaatggcgtgtattcagagcctcgccccattggcaccagatacctgactcgtaatctgtaa

SEQ ID NO: 496 - protein, 735 aa, Adeno-associated virus
MAADGYLPDWLEDTLSEGIRQWWKLKPGPPPPKPAERHKDDSRGLVLPGYKYLGPFNGLDKGEPVNEADAAALEHDKAYDRQLDSGDNPYLKYNHADAEFQERLKEDTSFGGNLGRAVFQAKKRVLEPLGLVEEPVKTAPGKKRPVEHSPAEPDSSSGTGKAGQQPARKRLNFGQTGDADSVPDPQPLGQPPAAPSGLGSTTMATGSGAPMADNNEGADGVGNSSGNWHCDSQWLGDRVITTSTRTWAQPTYNNHLYKQISSQSGASNDNHYFGYSTPWGYFDFNRFHCHFSPRDWQRLINNNWGFRPKRLNFKLFNIQVKEVTQNDGTTTIANNLTSTVQVFTDSEYQLPYVLGSAHQGCLPPFPADVFMVPQYGYLTLNNGSQAVGRSSFYCLEYFPSQMLRTGNNFQFSYTFEDVPFHSSYAHSQSLDRLMNPLIDQYLYYLNKTQSNSGALQQSRLLFSQAGPTSMSLQAKNWLPGPCYRQQRLSKQANDNNNSNFPWTAATKYHLNGRDSLVNPGPAMASHKDDEEKFFPMHGTLIFGKQGTNANDADLDNVMITDEEEIRTTNPVATEQYGYVSNNLQNSNTGPTTGTVNHRGALPGMVWQDRDVYLQGPIWAKIPHTDGHFHPSPLMGGFGLKHPPPQIMIKNTPVPANPPTNFSSAKFASFITQYSTGQVSVEIEWELQKENSKRWNPEIQYTSNYNKSVNVDFTVDTNGVYSEPRPIGTRYLTRNL

SEQ ID NO: 497 - DNA, 2217 bp, Adeno-associated virus
atggctgccgatggttatcttccagattggctcgaggacaacctctctgagggcattcgcgagtggtgggcgctgaaacctggagccccgaagcccaaagccaaccagcaaaagcaggacgacggccggggtctggtgcttcctggctacaagtacctcggacccttcaacggactcgacaagggggagcccgtcaacgcggcggacgcagcggccctcgagcacgacaaggcctacgaccagcagctgcaggcgggtgacaatccgtacctgcggtataatcacgccgacgccgagtttcaggagcgtctgcaagaagatacgtcttttgggggcaacctcgggcgagcagtcttccaggccaagaagcgggttctcgaacctctcggtctggttgaggaaggcgctaagacggctcctggaaagaagagaccggtagagccgtcaccacagcgttcccccgactcctccacgggcatcggcaagaaaggccagcagcccgccagaaagagactcaatttcggtcagactggcgactcagagtcagtccccgaccctcaacctatcggagaacctccagcagcgccctctagtgtgggatctggtacaatggctgcaggcggtggcgcgccaatggcagacaataacgaaggtgccgacggagtgggtagttcctcgggaaattggcattgcgattccacatggctgggcgacagagtcatcaccaccagcacccgaacctgggccctgcccacctacaacaaccacctctacaagcaaacctccaacgggacctcgggaggcagcaccaacgacaacacctactttggctacagcaccccctgggggtattttgactttaacagattccactgccacttctcaccacgtgactggcagcgactcatcaacaacaactggggattccggcccaagagactcagcttcaagctcttcaacatccaggtcaaagaggtcacgcagaatgaaggcaccaagaccatcgccaataacctcaccagcaccatccaggtgtttacggactcggaataccagctgccgtacgtcctcggctctgcccaccagggctgcctgcctccgttcccggcggacgtcttcatgattcctcagtacggctacctgactctcaacaacggtagtcaggccgtgggacgttcctccttctactgcctggagtacttcccctctcagatgctgagaacgggcaacaacttttccttcagctacactttcgaggacgtgcctttccacagcagctacgcgcacagccagagtttggacaggctgatgaatcctctcatcgaccagtacctgtactacctgtcaagaacccagtctacgggaggcacagcgggaacccagcagttgctgttttctcaggccgggcctagcaacatgtcggctcaggccagaaactggctgcctggaccctgctacagacagcagcgcgtctccacgacactgtcgcaaaacaacaacagcaactttgcctggactggtgccaccaagtatcatctgaacggcagagactctctggtgaatccgggcgtcgccatggcaaccaacaaggacgacgaggaccgcttcttcccatccagcggcatcctcatgtttggcaagcagggagctggaaaagacaacgtggactatagcaacgtgatgctaaccagcgaggaagaaatcaagaccaccaaccccgtggccacagaacagtatggcgtggtggctgataacctacagcagcaaaacaccgctcctattgtgggggccgtcaacagccagggagccttacctggcatggtctggcagaaccgggacgtgtacctgcagggtcctatttgggccaagattcctcacacagatggcaactttcacccgtctcctttaatgggcggctttggacttaaacatccgcctcctcagatcctcatcaaaaacactcctgttcctgcggatcctccaacagcgttcaaccaggccaagctgaattctttcatcacgcagtacagcaccggacaagtcagcgcggagatcgagtgggagctgcagaaggagaacagcaagcgctggaacccagagattcagtatacttccaactactacaaatctacaaatgtggactttgctgttaatactgagggtgtttactctgagcctcgccccattggcactcgttacctcacccgtaatctgtaa

SEQ ID NO: 498 - protein, 738 aa, Adeno-associated virus
MAADGYLPDWLEDNLSEGIREWWALKPGAPKPKANQQKQDDGRGLVLPGYKYLGPFNGLDKGEPVNAADAAALEHDKAYDQQLQAGDNPYLRYNHADAEFQERLQEDTSFGGNLGRAVFQAKKRVLEPLGLVEEGAKTAPGKKRPVEPSPQRSPDSSTGIGKKGQQPARKRLNFGQTGDSESVPDPQPIGEPPAAPSSVGSGTMAAGGGAPMADNNEGADGVGSSSGNWHCDSTWLGDRVITTSTRTWALPTYNNHLYKQTSNGTSGGSTNDNTYFGYSTPWGYFDFNRFHCHFSPRDWQRLINNNWGFRPKRLSFKLFNIQVKEVTQNEGTKTIANNLTSTIQVFTDSEYQLPYVLGSAHQGCLPPFPADVFMIPQYGYLTLNNGSQAVGRSSFYCLEYFPSQMLRTGNNFSFSYTFEDVPFHSSYAHSQSLDRLMNPLIDQYLYYLSRTQSTGGTAGTQQLLFSQAGPSNMSAQARNWLPGPCYRQQRVSTTLSQNNNSNFAWTGATKYHLNGRDSLVNPGVAMATNKDDEDRFFPSSGILMFGKQGAGKDNVDYSNVMLTSEEEIKTTNPVATEQYGVVADNLQQQNTAPIVGAVNSQGALPGMVWQNRDVYLQGPIWAKIPHTDGNFHPSPLMGGFGLKHPPPQILIKNTPVPADPPTAFNQAKLNSFITQYSTGQVSAEIEWELQKENSKRWNPEIQYTSNYYKSTNVDFAVNTEGVYSEPRPIGTRYLTRNL

SEQ ID NO: 499 - DNA, 2217 bp, Adeno-associated virus
atggctgctgacggttatcttccagattggctcgaggacaacctctctgagggcattcgcgagtggtgggacctgaaacctggagcccccaagcccaaggccaaccagcagaagcaggacgacggccggggtctggtgcttcctggctacaagtacctcggacccttcaacggactcgacaagggggagcccgtcaacgcggcggacgcagcggccctcgagcacgacaaggcctacgaccagcagctcaaagcgggtgacaatccgtacctgcggtataatcacgccgacgccgagtttcaggagcgtctgcaagaagatacgtcttttgggggcaacctcgggcgagcagtcttccaggccaagaagcgggttctcgaacctctcggtctggttgaggaagctgctaagacggctcctggaaagaagagaccggtagaaccgtcacctcagcgttcccccgactcctccacgggcatcggcaagaaaggccagcagcccgctagaaagagactgaactttgggcagactggcgactcagagtcagtccccgaccctcaaccaatcggagaacctccagcagcgccctctagtgtgggatctggtacaatggccgcaggcggtggcgcaccaatggcagacaataacgaaggtgccgacggagtgggtagttcctcgggaaattggcattgcgattccacatggctgggcgacagagtcatcaccaccagcacccgaacctgggccctgcccacctacaacaaccacctctacaagcaaatctccaacgggacctcgggaggcagcaccaacgacaacacctactttggctacagcaccccctgggggtattttgactttaacagattccactgccacttctcaccacgtgactggcagcgactcatcaacaacaactggggattccggcccaagagactcagcttcaagctcttcaacatccaggtcaaagaggtcacgcagaatgaaggcaccaagaccatcgccaataacctcaccagcaccatccaggtgtttacggactcggaataccagctgccgtacgtcctcggctctgcccaccagggctgcctgcctccgttcccggcggacgtcttcatgattcctcagtacggctacctgactctcaacaacggtagtcaggccgtgggacgttcctccttctactgcctggagtacttcccctctcagatgctgagaacgggcaacaacttttccttcagctacactttcgaggacgtgcctttccacagcagctacgcgcacagccagagtttggacaggctgatgaatcctctcatcgaccagtacctgtactacctgtcaagaacccagtctacgggaggcacagcgggaacccagcagctgctgttttctcaggccgggcctagcaacatgtcggctcaggccagaaactggctgcctggaccctgctacagacagcagcgcgtctccacgacactgtcgcaaaacaacaacagcaactttgcctggactggtgccaccaagtatcatctgaacggcagagactctctggtgaatccgggcgtcgccatggcaaccaacaaggacgacgaggaccgcttcttcccatccagcggcatcctcatgtttggcaagcagggagctggaaaagacaacgtggactatagcaacgtgatgctaaccagcgaggaagaaatcaagaccaccaaccccgtggccacagaacagtatggcgtggtggctgataacctacagcagcaaaacaccgctcctattgtgggggccgtcaacagccagggagccttacctggcatggtctggcagaaccgggacgtgtacctgcagggtcctatttgggccaagattcctcacacagatggcaactttcacccgtctcctttaatgggcggctttggacttaaacatccgcctcctcagatcctcatcaaaagcactcctgttcctgcggatcctccaacagcgttcaaccaggccaagctgaattctttcatcacgcagtacagcaccggacaagtcagcgtggagatcgagtgggagctgcagaaggagaacagcaagtgctggaacccagagattcagtatacttccaactactacaaatctacaaatgtggactttgctgttaatactgagggtgtttactctgagcctcgccccattggcactcgttacctcacccgtaatctgtaa

SEQ ID NO: 500 - protein, 738 aa, Adeno-associated virus
MAADGYLPDWLEDNLSEGIREWWDLKPGAPKPKANQQKQDDGRGLVLPGYKYLGPFNGLDKGEPVNAADAAALEHDKAYDQQLKAGDNPYLRYNHADAEFQERLQEDTSFGGNLGRAVFQAKKRVLEPLGLVEEAAKTAPGKKRPVEPSPQRSPDSSTGIGKKGQQPARKRLNFGQTGDSESVPDPQPIGEPPAAPSSVGSGTMAAGGGAPMADNNEGADGVGSSSGNWHCDSTWLGDRVITTSTRTWALPTYNNHLYKQISNGTSGGSTNDNTYFGYSTPWGYFDFNRFHCHFSPRDWQRLINNNWGFRPKRLSFKLFNIQVKEVTQNEGTKTIANNLTSTIQVFTDSEYQLPYVLGSAHQGCLPPFPADVFMIPQYGYLTLNNGSQAVGRSSFYCLEYFPSQMLRTGNNFSFSYTFEDVPFHSSYAHSQSLDRLMNPLIDQYLYYLSRTQSTGGTAGTQQLLFSQAGPSNMSAQARNWLPGPCYRQQRVSTTLSQNNNSNFAWTGATKYHLNGRDSLVNPGVAMATNKDDEDRFFPSSGILMFGKQGAGKDNVDYSNVMLTSEEEIKTTNPVATEQYGVVADNLQQQNTAPIVGAVNSQGALPGMVWQNRDVYLQGPIWAKIPHTDGNFHPSPLMGGFGLKHPPPQILIKSTPVPADPPTAFNQAKLNSFITQYSTGQVSVEIEWELQKENSKCWNPEIQYTSNYYKSTNVDFAVNTEGVYSEPRPIGTRYLTRNL

SEQ ID NO: 501 - protein, 738 aa, Adeno-associated virus
MAADGYLPDWLEDNLSEGIREWWDLKPGAPKPKANQQKQDDGRGLVLPGYKYLGPFNGLDKGEPVNAADAAALEHDKAYDQQLKAGDNPYLRYNHADAEFQERLQEDTSFGGNLGRAVFQAKKRVLEPLGLVEEAAKTAPGKKRPVEPSPQRSPDSSTGIGKKGQQPARKRLNFGQTGDSESVPDPQPIGEPPAAPSSVGSGTMAAGGGAPMADNNEGADGVGSSSGNWHCDSTWLGDRVITTSTRTWALPTYNNHLYKQISNGTSGGSTNDNTYFGYSTPWGYFDFNRFHCHFSPRDWQRLINNNWGFRPKRLSFKLFNIQVKEVTQNEGTKTIANNLTSTIQVFTDSEYQLPYVLGSAHQGCLPPFPADVFMIPQYGYLTLNNGSQAVGRSSFYCLEYFPSQMLRTGNNFSFSYTFEDVPFHSSYAHSQSLDRLMNPLIDQYLYYLSRTQSTGGTAGTQQLLFSQAGPSNMSAQARNWLPGPCYRQQRVSTTLSQNNNSNFAWTGATKYHLNGRDSLVNPGVAMATNKDDEDRFFPSSGILMFGKQGAGKDNVDYSNVMLTSEEEIKTTNPVATEQYGVVADNLQQQNTAPIVGAVNSQGALPGMVWQNRDVYLQGPIWAKIPHTDGNFHPSPLMGGFGLKHPPPQILIKSTPVPADPPTAFNQAKLNSFITQYSTGQVSVEIEWELQKENSKRWNPEIQYTSNYYKSTNVDFAVNTEGVYSEPRPIGTRYLTRNL

SEQ ID NO: 502 - DNA, 2217 bp, Adeno-associated virus
atggctgctgacggttatcttccagattggctcgaggacaacctctctgagggcattcgcgagtggtgggacctgaaacctggagcccccaagcccaaggccaaccagcagaagcaggacgacggccggggtctggtgcttcctggctacaagtacctcggacccttcaacggactcgacaagggggagcccgtcaacgcggcggacgcagcggccctcgagcacgacaaggcctacgaccagcagctcaaagcgggtgacaatccgtacctgcggtataaccacgccgacgccgagtttcaggagcgtctgcaagaagatacgtcttttgggggcaacctcgggcgagcagtcttccaggccaagaagcgggttctcgaacctctcggtctggttgaggaagctgctaagacggctcctggaaagaagagaccggtagaaccgtcacctcagcgttcccccgactcctccacgggcatcggcaagaaaggccagcagcccgctagaaagagactgaactttgggcagactggcgactcagagtcagtccccgaccctcaaccaatcggagaaccaccagcaggcccctctggtctgggatctggtacaatggctgcaggcggtggcgcaccaatggctgacaataacgagggcgccgacggagtgggtaatgcctcaggaaattggcattgcgattccacatggctgggcgacagagtcatcaccaccagcacccgaacctgggctttgcccacctacaacaaccacctctacaagcaaatctccagtcagtcagcaggtagcaccaacgacaacgtctacttcggctacagcaccccctgggggtattttgacttcaacagattccactgtcacttctcaccacgtgactggcagcggctcatcaacaacaactggggattccggcccaagaagctcaacttcaagctgttcaacatccaggtcaaggaggtcacaacgaatgacggcgtcacgaccatcgccaataaccctaccagcacggttcaggtcttttcggactcggaataccagctgccctacgtcctcggctccgcacaccagggctgcctgcctccgttcccggcggacgtcttcatgattccccagtacggctacctgactctgaacaatggcagccaatcggtgggtcgttcctctttctactgcctggaatatttcccttctcaaatgctgagaacgggcaacaacttcaccttcagctacaccttcgaggacgttcccttccacagcagctacgcacacagccagagcctggaccggctgatgaatcctcttatcgaccagtacctgtattacctggccagaacacagagcaacgcaggaggcacagctggcaatcgggaactgcagttttatcagggcgggcctaccaccatggccgaacaagccaaaaactggctgcctggaccctgctacagacagcagcgcgtctccacgacactgtcgcaaaacaacaacagcaactttgcctggactggtgccaccaagtatcatctgaacggcagagactctctggtgaatccgggcgtcgccatggcaaccaacaaggacgacgaggaccgcttcttcccatccagcggcatcctcatgtttggcaagcagggagctggaaaagacaacgtggactatagcaacgtgatgctaaccagcgaggaagaaatcaagaccaccaaccccgtggccacagaacagtatggcgtggtggctgataacctacagcagcaaaacaccgctcctattgtgggggccgtcaacagccagggagccttacctggcatggtctggcagaaccgggacgtgtacctgcagggtcctatttgggccaagattcctcacacagatggcaactttcacccgtctcctttaatgggcggctttggacttaaacatccgcctcctcagatcctcatcaaaaacactcctgttcctgcggatcctccaacagcgttcaaccaggccaagctgaattctttcatcacgcagtacagcaccggacaagtcagcgtggagatcgagtgggagctgcagaaggagaacagcaagcgctggaacccagagattcagtatacttccaactactacaaatctacaaatgtggactttgctgttaatactgagggtgtttactctgagcctcgccccattggcactcgttacctcacccgtaatctgtaa

SEQ ID NO: 503 - protein, 738 aa, Adeno-associated virus
MAADGYLPDWLEDNLSEGIREWWDLKPGAPKPKANQQKQDDGRGLVLPGYKYLGPFNGLDKGEPVNAADAAALEHDKAYDQQLKAGDNPYLRYNHADAEFQERLQEDTSFGGNLGRAVFQAKKRVLEPLGLVEEAAKTAPGKKRPVEPSPQRSPDSSTGIGKKGQQPARKRLNFGQTGDSESVPDPQPIGEPPAGPSGLGSGTMAAGGGAPMADNNEGADGVGNASGNWHCDSTWLGDRVITTSTRTWALPTYNNHLYKQISSQSAGSTNDNVYFGYSTPWGYFDFNRFHCHFSPRDWQRLINNNWGFRPKKLNFKLFNIQVKEVTTNDGVTTIANNPTSTVQVFSDSEYQLPYVLGSAHQGCLPPFPADVFMIPQYGYLTLNNGSQSVGRSSFYCLEYFPSQMLRTGNNFTFSYTFEDVPFHSSYAHSQSLDRLMNPLIDQYLYYLARTQSNAGGTAGNRELQFYQGGPTTMAEQAKNWLPGPCYRQQRVSTTLSQNNNSNFAWTGATKYHLNGRDSLVNPGVAMATNKDDEDRFFPSSGILMFGKQGAGKDNVDYSNVMLTSEEEIKTTNPVATEQYGVVADNLQQQNTAPIVGAVNSQGALPGMVWQNRDVYLQGPIWAKIPHTDGNFHPSPLMGGFGLKHPPPQILIKNTPVPADPPTAFNQAKLNSFITQYSTGQVSVEIEWELQKENSKRWNPEIQYTSNYYKSTNVDFAVNTEGVYSEPRPIGTRYLTRNL

SEQ ID NO: 504 - DNA, 2208 bp, Adeno-associated virus
atggctgccgatggttatcttccagattggctcgaggacaacctctctgagggcattcacgagtggtgggacccgaaacctggagccccgaaacccaaagccaaccagcaaaagcaggacgacggccggggtctggtgcttcctggctacaagtacctcggacccttcaacggactcgacaagggggagcccgtcaacgcggcggacgcagcggccctcgagcacgacaaggcctacgaccagcagctcaaagcgggtgacaatccgtacctgcggtataatcacgccgacgccgagtttcaggagcgtctgcaagaagatacgtcttttgggggcaacctcgggcgagcagtcttccaggccaagaagcgggttctcgaacctctcggtctggttgaggaaggcgctaagacggctcctggaaagaagagaccggtagagccgtcaccacagcgttcccccgactcctccacgggcatcggcaagaaaggccagcagcccgccagaaagagactcaatttcggtcagactggcgactcagagtcagtccccgaccctcaacctatcggagaacctccagcagcgccctctagtgtgggatctggtacaatggctgcaggcggtggcgcaccaatggcagacaataacgaaggtgccgacggagtgggtagttcctcgggaaattggcattgcgattccacatggctgggcgacagagtcatcaccaccagcacccgaacctgggccctgcccacccacaacaaccacctctacaagcaaatctccaacgggacctcgggaggcagcaccaacgacaacgtctacttcggctacagcaccccctgggggtattttgacttcaacagattccactgtcacttctcaccacgtgaccggcagcgactcatcaacaacaactggggattccggcccaagagactcagcttcaagctcttcaacatccaggtcaaagaggtcacgcagaatgaaggcaccaagaccatcgccaataacctcaccagcaccatccaggtgtttacggactcggaataccagctgccgtacgtcctcggctctgcccaccagggctgcctgcctccgttcccggcggacgtcttcatgattcctcagtacggctacctgactctcaacaacggtagtcaggccgtgggacgttcctccttctactgcctggagtacttcccctctcagatgctgagaacgggcaacaacttttccttcagctacactttcgaggacgtgcctttccacagcagctacgcgcacagccagagtttggacaggctgatgaatcctctcatcgaccagtacctgtactacctgtcaagaacccagtctacggaaggcacagcgggaacccagcagttgctgttttctcaggccgggcctagcaacatgtcggctcaggccagaaactggctgcctggaccctgctacagacagcagcgcgtctccacgacactgtcgcaaaacaacaacagcaactttgcctggactggtgccaccaagtatcatctgaacggcagagactctctggtgaatccgggcgtcgccatggcaacccacaaggacgacgaggaacgcttcttcccttcgagcggagtcctgatttttggaaaaactggagcagctaataagactacactggaaaatgtgttaatgacaaatgaagaggaaattcgtcctaccaacccggtagccaccgaggaatacgggactgttagcagcaacctgcaggcggctaacactgcagcccagacacaagttgtcaacaaccagggagccttacctggtatggtctggcagaaccgggacgtgtacctgcagggtcccatctgggccaagattcctcacacggacggcaactttcacccgtctccgctgatgggcggctttggactgaagcatcctcagatcctgatcaaaaacactcctgttcctgctaatcccccggaggtgtttacgcctgccaagtttgcttctttcatcacacagtacagcaccggccaggtcagcgtggagatcgagtgggagctgcagaaggagaacagcaagcgctggaacccagagattcagtatacctccaattttgacaaacagactggtgtggactttgccgttgacagccagggtgtttattctgagcctcgccccattggtactcgttacctcacccgtaatctgtaa

SEQ ID NO: 505 - protein, 735 aa, Adeno-associated virus
MAADGYLPDWLEDNLSEGIHEWWDPKPGAPKPKANQQKQDDGRGLVLPGYKYLGPFNGLDKGEPVNAADAAALEHDKAYDQQLKAGDNPYLRYNHADAEFQERLQEDTSFGGNLGRAVFQAKKRVLEPLGLVEEGAKTAPGKKRPVEPSPQRSPDSSTGIGKKGQQPARKRLNFGQTGDSESVPDPQPIGEPPAAPSSVGSGTMAAGGGAPMADNNEGADGVGSSSGNWHCDSTWLGDRVITTSTRTWALPTHNNHLYKQISNGTSGGSTNDNVYFGYSTPWGYFDFNRFHCHFSPRDRQRLINNNWGFRPKRLSFKLFNIQVKEVTQNEGTKTIANNLTSTIQVFTDSEYQLPYVLGSAHQGCLPPFPADVFMIPQYGYLTLNNGSQAVGRSSFYCLEYFPSQMLRTGNNFSFSYTFEDVPFHSSYAHSQSLDRLMNPLIDQYLYYLSRTQSTEGTAGTQQLLFSQAGPSNMSAQARNWLPGPCYRQQRVSTTLSQNNNSNFAWTGATKYHLNGRDSLVNPGVAMATHKDDEERFFPSSGVLIFGKTGAANKTTLENVLMTNEEEIRPTNPVATEEYGTVSSNLQAANTAAQTQVVNNQGALPGMVWQNRDVYLQGPIWAKIPHTDGNFHPSPLMGGFGLKHPQILIKNTPVPANPPEVFTPAKFASFITQYSTGQVSVEIEWELQKENSKRWNPEIQYTSNFDKQTGVDFAVDSQGVYSEPRPIGTRYLTRNL

SEQ ID NO: 506 - protein, 738 aa, Adeno-associated virus
MAADGYLPDWLEDNLSEGIREWWDLKPGAPKPKANQQKQDDGRGLVLPGYKYLGPFNGLDKGEPVNAADAAALEHDKAYDQQLKAGDNPYLRYNHADAEFQERLQEDTSFGGNLGRAVFQAKKRVLEPLGLVEEGAKTAPGKKRPVEPSPQRSPDSSTGIGKKGQQPARKRLNFGQTGDSESVPDPQPIGEPPAAPSSVGSGTMAAGGGAPMADNNEGADGVGSSSGNWHCDSTWLGDRVITTSTRTWALPTYNNHLYKQISNGTSGGSTNDNTYFGYSTPWGYFDFNRFHCHFSPRDWQRPINNNWGFRPKRLSFKLFNIQVKEVTQNEGTKTIANNLTSTIQVFTDSEYQLPYVLGSAHQGCLPPFPADVFMIPQYGYLTLNNGSQAVGRSSFYCLEYFPSQMLRTGNNFSFSYPFEDVPFHSSYAHSQSLDRLMNPLIDQYLYYLSRTQSTGGTAGTQQLLFSQAGPSNMSAQARNWLPGPCYRQQRVSTTLSQNNNSNFAWTGATKYHLNGRDSLVNPGVAMATNKDDEDRFFPSSGILMFGKQGAGKDNVDYSNVMLTSEEEIKTTNPVATEQYGVVADNLQQQDTAPIVGAVNSQGALPGMVWQNRDVYLQGPIWAKIPHTDGNFHPSPLMGGFGLKHPPPQVLIKNTPVPADPPTAFNQAKLNSFITQYSTGQVSVEIEWELQKENSKRWNPEIQYTSNYYKSTNVDFAVNTEGVYSEPRPIGTRYLTRNL

SEQ ID NO: 507 - DNA, 2217 bp, Adeno-associated virus
atggctgccgatggttatcttccagattggctcgaggacaacctctctgagggcattcgcgagtggtgggacctgaaacctggagccccgaaacccaaggccaaccagcaaaagcaggacgacggccggggtctggtgcttcctggctacaagtacctcggacccttcaacggactcgacaagggggagcccgtcaacgcggcggacgcagcggccctcgagcacgacaaggcctacgaccagcagctcaaagcgggtgacaatccgtacctgcggtataatcacgccgacgccgagtttcaggagcgtctgcaagaagatacgtcttttgggggcaacctcgggcgagcagtcttccaggccaagaagcgggttctcgaacctctcggtctggttgaggaaggcgctaagacggctcctggaaagaagagaccggtagagccgtcaccacagcgttcccccgactcctccacgggcatcggcaagaaaggccagcagcccgccagaaagagactcaatttcggtcagactggcgactcagagtcagtccccgaccctcaacctatcggagaacctccagcagcgccctctagtgtgggatctggtacaatggctgcaggcggtggcgcaccaatggcagacaataacgaaggtgccgacggagtgggtagttcctcgggaaattggcattgcgattccacatggctgggcgacagagtcatcaccaccagcacccgaacctgggccctgcccacctacaacaaccacctctacaagcaaatctccaacgggacctcgggaggcagcaccaacgacaacacctactttggctacagcaccccctgggggtattttgactttaacagattccactgccacttctcaccacgtgactggcagcgacccatcaacaacaactggggattccggcccaagagactcagcttcaagctcttcaacatccaggtcaaagaggtcacgcagaatgaaggcaccaagaccatcgccaataacctcaccagcaccatccaggtgtttacggactcggaataccagctgccgtacgtcctcggctctgcccaccagggctgcctgcctccgttcccggcggacgtcttcatgattcctcagtacggctacctgactctcaacaacggtagtcaggccgtgggacgttcctccttctactgcctggagtacttcccctctcagatgctgagaacgggcaacaacttttccttcagctaccctttcgaggacgtgcctttccacagcagctacgcgcacagccagagtttggacaggctgatgaatcctctcatcgaccagtacctgtactacctgtcaagaacccagtctacgggaggcacagcgggaacccagcagttgctgttttctcaggccgggcctagcaacatgtcggctcaggccagaaactggctgcctggaccctgctacagacagcagcgcgtctccacgacactgtcgcaaaacaacaacagcaactttgcctggactggtgccaccaagtatcatctgaacggcagagactctctggtgaatccgggcgtcgccatggcaaccaacaaggacgacgaggaccgcttcttcccatccagcggcatcctcatgtttggcaagcagggagctggaaaagacaacgtggactatagcaacgtgatgctaaccagcgaggaagaaatcaagaccaccaaccccgtggccacagaacagtatggcgtggtggctgataacctacagcagcaagacaccgctcctattgtgggggccgtcaacagccagggagccttacctggcatggtctggcagaaccgggacgtgtacctgcagggtcctatttgggccaagattcctcacacagatggcaactttcacccgtctcctttaatgggcggctttggacttaaacatccgcctcctcaggtcctcatcaaaaacactcctgttcctgcggatcctccaacagcgttcaaccaggccaagctgaattctttcatcacgcagtacagcaccggacaagtcagcgtggagatcgagtgggagctgcagaaggagaacagcaagcgctggaacccagagattcagtatacttccaactactacaaatctacaaatgtggactttgctgttaatactgagggtgtttactctgagcctcgccccattggcactcgttacctcacccgtaatctgtaa

SEQ ID NO: 508 - DNA, 2214 bp, Adeno-associated virus
atggctgctgacggttatcttccagattggctcgaggacaacctctctgagggcattcgcgagtggtgggacctgaaacctggagcccccaagcccaaggccaaccagcagaagcaggacgacggccggggtctggtgcttcctggctacaagtacctcggacccttcaacggactcgacaagggggagcccgtcaacgcggcggacgcagcggccctcgagcacgacaaggcctacgaccagcagctcaaagcgggtgacaatccgtacctgcggtataaccacgccgacgccgagttccaggagcgtctgcaagaagatacgtcttttgggggcaacctcgggcgagcagtcttccaggccaagaagcgggttctcgaacctctcggtctggctgaggaagctgctaagacggctcctggaaagaagagaccggtagaaccgtcacctcagcgttcccccgactcctccacgggcatcggcaagaaaggccagcagcccgctagaaagagactgaactttgggcagactggcgactcagagtcagtccccgaccctcaaccaatcggagagccaccagcaggcccctctggtctgggatctggtacaatggctgcaggcggtggcgcaccaatggctgacaataacaagggcgccgacggagtgggtaatgcctcaggaaattggcattgcgattccacatggctgggcgacagagtcatcaccaccagcacccgaacctgggctttgcccacctacaacaaccacctctacaagcaaatctccagtcagtcagcaggtagcaccaacgacaacgtctacttcggctacagcaccccctgggggtattttgacttcaacagattccactgtcacttctcaccacgtgactggcagcggctcatcaacaacaactggggattccggcccaagaagctcaacttcaagctgttcaacatccaggtcaaggaggtcacaacgggtgacggcgtcacgaccatcgccaataaccttaccagcacggttcaggtcttttcggactcggaataccagctgccctacgtcctcggctccgcacaccagggctgcctgcctccgttcccggcggacgtcttcatgattccccagtacggctacctgactctgaacaatgacagccaatcggtgggtcgttcctctttctactgcctggaatatttcccttctcaaatgctgagaacgggcaacaacttcaccttcagctacaccttcgaggacgttcccttccacagcagctacgcacacagccagagcctggaccggctgatgaatcctcttatcgaccagtacctgtattacctggccagaacacagagcaacgcaggaggcacagctggcaatcgggaactgcagttttatcagggcgggcctaccaccatggccgaacaagccaaaaactggctgcctggaccttgcttccggcaacaaagagtctccaagacgctggatcaaaacaacaacagcaactttgcttggactggtgccaccaaataccatctaaatggaagaaattcattggttaatcccggtgtcgccatggcaacccacaaggacgacgaggaacgcttcttcccttcgagcggagtcctgatttttggaaaaactggagcagctaataagactacactggaaaatgtgttaatgacaaatgaagaggaaattcgtcctaccaacccggtagccaccgaggaatacgggactgttagcagcaacctgcaggcggctaacactgcagcccagacacaagttgtcaacaaccagggagccttacctggtatggtctggcagaaccgggacgtgtacctgcagggtcccatctgggccaagattcctcacacggacggcaactttcacccgtctccgctgatgggcggctttggactgaagcatccgcctcctcagatcctgatcaaaaacactcctgttcctgctaatcccccggaggtgtttacgcctgccaagtttgcttctttcatcacacagtacagcaccggccaggtcagcgtggagatcgagtgggagctgcagaaggagaacagcaagcgctggaacccagagattcagtatacctccaattttgacaaacagactggtgtggactttgccgttgacagccagggtgtttattctgagcctcgccccattggtactcgttacctcacccgtaatctgtaa

SEQ ID NO: 509 - protein, 737 aa, Adeno-associated virus
MAADGYLPDWLEDNLSEGIREWWDLKPGAPKPKANQQKQDDGRGLVLPGYKYLGPFNGLDKGEPVNAADAAALEHDKAYDQQLKAGDNPYLRYNHADAEFQERLQEDTSFGGNLGRAVFQAKKRVLEPLGLAEEAAKTAPGKKRPVEPSPQRSPDSSTGIGKKGQQPARKRLNFGQTGDSESVPDPQPIGEPPAGPSGLGSGTMAAGGGAPMADNNKGADGVGNASGNWHCDSTWLGDRVITTSTRTWALPTYNNHLYKQISSQSAGSTNDNVYFGYSTPWGYFDFNRFHCHFSPRDWQRLINNNWGFRPKKLNFKLFNIQVKEVTTGDGVTTIANNLTSTVQVFSDSEYQLPYVLGSAHQGCLPPFPADVFMIPQYGYLTLNNDSQSVGRSSFYCLEYFPSQMLRTGNNFTFSYTFEDVPFHSSYAHSQSLDRLMNPLIDQYLYYLARTQSNAGGTAGNRELQFYQGGPTTMAEQAKNWLPGPCFRQQRVSKTLDQNNNSNFAWTGATKYHLNGRNSLVNPGVAMATHKDDEERFFPSSGVLIFGKTGAANKTTLENVLMTNEEEIRPTNPVATEEYGTVSSNLQAANTAAQTQVVNNQGALPGMVWQNRDVYLQGPIWAKIPHTDGNFHPSPLMGGFGLKHPPPQILIKNTPVPANPPEVFTPAKFASFITQYSTGQVSVEIEWELQKENSKRWNPEIQYTSNFDKQTGVDFAVDSQGVYSEPRPIGTRYLTRNL

SEQ ID NO: 510 - DNA, 2217 bp, Adeno-associated virus
atggctgccgatggttatcttccagattggctcgaggacaacctctctgagggcattcgcgagtggtgggacctgaaacctggagccccgaaacccaaagccaaccagcaaaagcaggacgacggccggggtctggtgcttcctggctacaagtacctcggacccttcaacggactcgacaagggggagcccgtcaacgcggcggacgcagcggccctcgagcacgacaaggcctacgaccagcagctcaaagcgggtgacaatccgtacctgcggtataatcacgccgacgccgagtttcaggagcgtctgcaagaagatacgtcttttgggggcaacctcgggcgagcagtcttccaggccaagaagcgggttctcgaacctctcggtctggttgaggaaggcgctaagacggctcctggaaagaagagaccggtagagccgtcaccacagcgttcccccgactcctccacgggcatcggcaagaaaggccagcagcccgccagaaagagactcaatttcggtcagactggcgactcagagtcagtccccgaccctcaacctatcggagaacctccagcagcgccctctagtgtgggatctggtacaatggctgcaggcggtggcgcaccaatggcagacaataacgaaggtgccgacggagtgggtagttcctcgggaaattggcattgcgattccacatggctgggcgacagagtcatcaccaccagcacccgaacctgggccctgcccacctacaacaaccacctctacaagcaaatctccaacgggacctcgggaggcagcaccaacgacaacacctactttggctacagcaccccctgggggtattttgactttaacagattccactgccacttctcaccacgtgactggcagcgactcatcaacaacaactggggattccggcccaagagactcagcttcaagctcttcaacatccaggtcaaagaggtcacgcagaatgaaggcaccaagaccatcgccaataacctcaccagcaccatccaggtgtttacggactcggaataccagctgccgtacgtcctcggctctgcccaccagggctgcctgcctccgttcccggcggacgtcttcatgattcctcagtacggctacctgactctcaacaacggtagtcaggccgtgggacgttcctccttctactgcctggagtacttcccctctcagatgctgagaacgggcaacaacttttccttcagctacactttcgaggacgtgcctttccacagcagctacgcgcacagccagagtttggacaggctgatgaatcctctcatcgaccagtacctgtactacctgtcaagaacccagtctacgggaggcacagcgggaacccagcagttgctgttttctcaggccgggcctagcaacatgtcggctcaggccagaaactggctgcctggaccctgctacagacagcagcgcgtctccacgacactgtcgcaaaacaacaacagcaactttgcctggactggtgccaccaagtatcatctgaacggcagagactctctggtgaatccgggcgtcgccatggcaaccaacaaggacgacgaggaccgcttcttcccatccagcggcatcctcatgtttggcaagcagggagctggaaaagacaacgtggactatagcaacgtgatgctaaccagcgaggaagaaatcaagaccaccaaccccgtggccacagaacagtatggcgtggtggctgataacctacagcagcaaaacaccgctcctattgtgggggccgtcaacagccagggagccttacctggcatggtctggcagaaccgggacgtgtacctgcagggtcctatttgggccaagattcctcacacagatggcaactttcacccgtctcctttaatgggcggctttggacttaaacatccgcctcctcagatcctcatcaaaaacactcctgttcctgcggatcctccaacagcgttcaaccaggccaagctgaattctttcatcacgcagtacagcaccggacaagtcagcgtggagatcgtgtgggagctgcagaaggagaacagcaagcgcaggaacccagagattcagtatacttccaactactacaaatctacaaatgtggactttgctgttaatactgagggtgtttactctgagcctcgccccattggcactcgttacctcacccgtaatctgtaa

SEQ ID NO: 511 - protein, 738 aa, Adeno-associated virus
MAADGYLPDWLEDNLSEGIREWWDLKPGAPKPKANQQKQDDGRGLVLPGYKYLGPFNGLDKGEPVNAADAAALEHDKAYDQQLKAGDNPYLRYNHADAEFQERLQEDTSFGGNLGRAVFQAKKRVLEPLGLVEEGAKTAPGKKRPVEPSPQRSPDSSTGIGKKGQQPARKRLNFGQTGDSESVPDPQPIGEPPAAPSSVGSGTMAAGGGAPMADNNEGADGVGSSSGNWHCDSTWLGDRVITTSTRTWALPTYNNHLYKQISNGTSGGSTNDNTYFGYSTPWGYFDFNRFHCHFSPRDWQRLINNNWGFRPKRLSFKLFNIQVKEVTQNEGTKTIANNLTSTIQVFTDSEYQLPYVLGSAHQGCLPPFPADVFMIPQYGYLTLNNGSQAVGRSSFYCLEYFPSQMLRTGNNFSFSYTFEDVPFHSSYAHSQSLDRLMNPLIDQYLYYLSRTQSTGGTAGTQQLLFSQAGPSNMSAQARNWLPGPCYRQQRVSTTLSQNNNSNFAWTGATKYHLNGRDSLVNPGVAMATNKDDEDRFFPSSGILMFGKQGAGKDNVDYSNVMLTSEEEIKTTNPVATEQYGVVADNLQQQNTAPIVGAVNSQGALPGMVWQNRDVYLQGPIWAKIPHTDGNFHPSPLMGGFGLKHPPPQILIKNTPVPADPPTAFNQAKLNSFITQYSTGQVSVEIVWELQKENSKRRNPEIQYTSNYYKSTNVDFAVNTEGVYSEPRPIGTRYLTRNL

SEQ ID NO: 512 - protein, 738 aa, Adeno-associated virus
MAADGYLPDWLEDNLSEGIREWWDLKPGAPKPKANQQKQDDGRGLVLPGYKYLGPFNGLDKGEPVNAADAAALEHDKAYDQQLKAGDNPYLRYNHADAEFQERLQEDTSFGGNLGRAVFQAKKRVLEPLGLVEEGAKTAPGKKRPVEPSPQRSPDSSTGIGKKGQQPARKRLNFGQTGDSESVPDPQPIGEPPAAPSSVGSGTMAAGGGAPMADNNEGADGVGSSSGNWHCDSTWLGDRVITTSTRTWALPTYNNHLYKQISNGTSGGSTNDNTYFGYSTPWGYFDFNRFHCHFSPRDWQRLINNNWGFRPKRLSFKLFNIQVKEVTQNEGTKTIANNLTSTIQVFTDSEYQLPYVLGSAHQGCLPPFPADVFMIPQYGYLTLNNGSQAVGRSSFYCLEYFPSQMLRTGNNFSFSYTFEDVPFHSSYAHSQSLDRLMNPLIDQYLYYLSRTQSTGGTAGTQQLLFSQAGPSNMSAQARNWLPGPCYRQQRVSTTLSQNNNSNFAWTGATKYHLNGRDSLVNPGVAMATNKDDEDRFFPSSGILMFGKQGAGKDNVDYSNVMLTSEEEIKTTNPVATEQYGVVADNLQQQNTAPIVGAVNSQGALPGMVWQNRDVYLQGPIWAKIPHTDGNFHPSPLMGGFGLKHPPPQILIKNTPVPADPPTAFNQAKLNSFITQYSTGQVSVEIEWELQKENSKRWNPEIQYTSNYYKSTNVDFAVNTEGVYSEPRPIGTRYLTRNL

SEQ ID NO: 513 - protein, 738 aa, Adeno-associated virus
MAADGYLPDWLEDNLSEGIREWWDLKPGAPKPKANQQKQDDGRGLVLPGYKYLGPFNGLDKGEPVNAADAAALEHDKAYDQQLKAGDNPYLRYNHADAEFQERLQEDTSFGGNLGRAVFQAKKRVLEPLGLVEEGAKTAPGKKRPVEPSPQRSPDSSTGIGKKGQQPARKRLNFGQTGDSESVPDPQPIGEPPAAPSSVGSGTMAAGGGAPMADNNEGADGVGSSSGNWHCDSTWLGDRVITTSTRTWALPTYNNHLYKQISNGTSGGSTNDNTYFGYSTPWGYFDFNRFHCHFSPRDWQRLINNNWGFRPKRLSFKLFNIQVKEVTQNEGTKTIANNLTSTIQVFTDSEYQLPYVLGSAHQGCLPPFPADVFMIPQYGYLTLNNGSQAVGRSSFYCLEYFPSQMLRTGNNFSFSYTFEDVPFHSSYAHSQSLDRLMNPLIDQYLYYLSRTQSTGGTAGTQQLLFSQAGPSNMSAQARNWLPGPCYRQQRVSTTLSQNNNSNFAWTGATKYHLNGRDSLVNPGVAMATNKDDEDRFFPSSGILMFGKQGAGKDNVDYSNVMLTSEEEIKTTNPVATEQYGVVADNLQQQNTAPIVGAVNSQGALPGMVWQNRDVYLQGPIWAKIPHTDGNFHPSPLMGGFGLKHPPPQILIKNTPVPADPPTAFNQAKLNSFITQYSTGQVSVEIVWELQKENSKRWNPEIQYTSNYYKSTNVDFAVNTEGVYSEPRPIGTRYLTRNL

SEQ ID NO: 514 - protein, 738 aa, Adeno-associated virus; identical to SEQ ID NO: 512

SEQ ID NO: 515 - DNA, 2214 bp, Adeno-associated virus
atggctgctgacggttatcttccagattggctcgaggacaacctctctgagggcattcgcgagtggtgggacctgaaacctggagcccccaagcccaaggccaaccagcagaagcaggacgacggccggggtctggtgcttcctggctacaagtacctcggacccttcaacggactcgacaagggggagcccgtcaacgcggcggacgcagcggccctcgagcacgacaaggcctacgaccagcagctcaaagcgggtgacaatccgtacctgcggtataaccacgccgacgccgagtttcaggagcgtctgcaagaagatacgtcttttgggggcaacctcgggcgagcagtcttccaggccaagaagcgggttctcgaacctctcggtctggttgaggaagctgctaagacggctcctggaaagaagagaccggtagaaccgtcacctcagcgttcccccgactcctccacgggcatcggcaagaaaggccagcagcccgctagaaagagactgaactttgggcagactggcgactcagagtcagtccccgaccctcaaccaatcggagaaccaccagcaggcccctctggtctgggatctggtacaatggctgcaggcggtggcgctccaatggcagacaataacgaaggcgccgacggagtgggtaatgcctcaggaaattggcattgcgattccacatggctgggcgacagagtcatcaccaccagcacccgaacctgggctttgcccacctacaacaaccacctctacaagcaaatctccagtcagtcagcaggtagcaccaacgacaacgtctacttcggctacagcaccccctgggggtattttgacttcaacagattccactgtcacttctcaccacgtgactggcagcggctcatcaacaacaactggggattccggcccaagaagctcaacttcaagctgttcaacatccaggtcaaggaggtcacaacgaatgacggcgtcacgaccatcgccaataaccttaccagcacggttcaggtcttttcggactcggaataccagctgccctacgtcctcggctccgcacaccagggctgcctgcctccgttcccggcggacgtcttcatgattccccagtacggctacctgactctgaacaatggcagccaatcggtgggtcgttcctctttctactgcctggaatatttcccttctcaaatgctgagaacgggcaacaacttcaccttcagctacaccttcgaggacgttcccttccacagcagctacgcacacagccagagcctggaccggctgatgaatcctcttatcgaccagtacctgtattacctggccagaacacagagcaacgcaggaggcacagctggcaatcgggaactgcagttttatcagggcgggcctaccaccatggccgaacaagccaaaaactggctgcctagaccttgcttccggcaacaaagagtctccaagacgctggatcaaaacaacaacagcaactttgcttggactggtgccaccaaataccatctaaatggaagaaattcattggttaatcccggtgtcgccatggcaacccacaaggacgacgaggaacgcttcttcccttcgagcggagtcctgatttttggaaaaactggagcagctaataagactacactggaaaatgtgttaatgacaaatgaagaggaaattcgtcctaccaacccggtagccaccgaggaatacgggactgttagcagcaacctgcaggcggctaacactgcagcccagacacaagttgtcaacaaccagggagccttacctggtatggtctggcagaaccgggacgtgtacctgcagggtcccatctgggccaagattcctcacacggacggcaactttcacccgtctccgctgatgggcggctttggactgaagcatccgcctcctcagatcctgatcaaaaacactcctgttcctgctaatcccccggaggtgtttacgcctgccaagtttgcttctttcatcacacagtacagcaccggccaggtcagcgtggagatcgagtgggagctgcagaaggagaacagcaagcgctggaacccagagattcagtatacctccaattttgacaaacagactggtgtggactttgccgttgacagccagggtgtttattctgagcctcgccccattggtactcgttacctcacccgtaatctgtaa

SEQ ID NO: 516 - protein, 737 aa, Adeno-associated virus
MAADGYLPDWLEDNLSEGIREWWDLKPGAPKPKANQQKQDDGRGLVLPGYKYLGPFNGLDKGEPVNAADAAALEHDKAYDQQLKAGDNPYLRYNHADAEFQERLQEDTSFGGNLGRAVFQAKKRVLEPLGLVEEAAKTAPGKKRPVEPSPQRSPDSSTGIGKKGQQPARKRLNFGQTGDSESVPDPQPIGEPPAGPSGLGSGTMAAGGGAPMADNNEGADGVGNASGNWHCDSTWLGDRVITTSTRTWALPTYNNHLYKQISSQSAGSTNDNVYFGYSTPWGYFDFNRFHCHFSPRDWQRLINNNWGFRPKKLNFKLFNIQVKEVTTNDGVTTIANNLTSTVQVFSDSEYQLPYVLGSAHQGCLPPFPADVFMIPQYGYLTLNNGSQSVGRSSFYCLEYFPSQMLRTGNNFTFSYTFEDVPFHSSYAHSQSLDRLMNPLIDQYLYYLARTQSNAGGTAGNRELQFYQGGPTTMAEQAKNWLPRPCFRQQRVSKTLDQNNNSNFAWTGATKYHLNGRNSLVNPGVAMATHKDDEERFFPSSGVLIFGKTGAANKTTLENVLMTNEEEIRPTNPVATEEYGTVSSNLQAANTAAQTQVVNNQGALPGMVWQNRDVYLQGPIWAKIPHTDGNFHPSPLMGGFGLKHPPPQILIKNTPVPANPPEVFTPAKFASFITQYSTGQVSVEIEWELQKENSKRWNPEIQYTSNFDKQTGVDFAVDSQGVYSEPRPIGTRYLTRNL

SEQ ID NO: 517 - DNA, 2214 bp, Adeno-associated virus
atggctgctgacggttatcttccagattggctcgaggacaacctctctgagggcattcgcgagtggtgggacctgaaacctggagcccccaagcccaaggccaaccagcagaagcaggacgacggccggggtctggtgcttcctggctacaagtacctcggacccttcaacggactcgacaagggggagcccgtcaacgcggcggacgcagcggccctcgagcacgacaaggcctacgaccagcagctcaaagcgggtgacaatccgtacctgcggtataaccatgccgacgccgagtttcaggagcgtctgcaagaagatacgtcttttgggggcaacctcgggcgagcagtcctccaggccaagaagcgggttctcgaacctctcggtctggttgaggaagctgctaagacggctcctggaaagaagagaccggtagaaccgtcacctcagcgttcccccgactcctccacgggcatcggcaagaaaggccagcagcccgctagaaagagactgaactttgggcagactggcgactcagagtcagtccccgaccctcaaccaatcggagaaccaccagcaggcccctctggtctgggatctggtacaatggctgcaggcggtggcgctccaatggcagacaataacgaaggcgccgacggagtgggtaatgcctcaggaaattggcattgcgattccacatggctgggcgacagagtcatcaccaccagcacccgaacctgggctttgcccacctacaacaaccacctctacaagcaaatctccagtcagtcagcaggtagcaccaacgacaacgtctacttcggctacagcaccccctgggggtattttgacttcaacagattccactgtcacttctcaccacgtgactggcagcggctcatcaacaacaactggggattccggcccaagaagctcaacttcaagctgttcaacatccaggtcaaggaggtcacaacgaatgacggcgtcacgaccatcgccaataaccttaccagcacggttcaggtcttttcggactcggaataccagctgccctacgtcctcggctccgcacaccagggctgcctgcctccgttcccggcggacgtcttcatgattccccagtacggctacctgactctgaacaatggcagccaatcggtgggtcgttcctctttctactgcctggaatatttcccttctcaaatgctgagaacgggcaacaacttcaccttcagctacaccttcgaggacgttcccttccacagcagctacgcacacagccagagcctggaccggctgatgaatcctcttatcgaccagtacctgtattacctggccagaacacagagcaacgcaggaggcacagctggcaatcgggaactgcagttttatcagggcgggcctaccaccatggccgaacaagccaaaaactggctgcctggaccttgcttccggcaacaaagagtctccaagacgctggatcaaaacaacaacagcaactttgcttggactggtgccaccaaataccatctaaatggaagaaattcattggttaatcccggtgtcgccatggcaacccacaaggacgacgaggaacgcttcttcccttcgagcggagtcctgatttttggaaaaactggagcagctaataagactacactggaaaatgtgttaatgacaaatgaagaggaaattcgtcctaccaacccggtagccaccgaggaatacgggactgttagcagcaacctgcaggcggctaacactgcagcccagacacaagttgtcaacaaccagggagccttacctggtatggtctggcagaaccgggacgtgtacctgcagggtcccatctgggccaagattcctcacacggacggcaactttcacccgtctccgctgatgggcggctttggactgaagcatccgcctcctcagatcctgatcaaaaacactcctgttcctgctaatcccccggaggtgtttacgcctgccaagtttgcttctttcatcacacagtacagcaccggccaggtcagcgtggagatcgagtgggagctgcagaaggagaacagcaagcgctggaacccagagattcagtatacctccaattttgacaaacagactggtgtggactttgccgttgacagccagggtgtttattctgagcctcgccccattggtactcgttacctcacccgtaatctgtaa

SEQ ID NO: 518 - protein, 737 aa, Adeno-associated virus; identical to SEQ ID NO: 477

SEQ ID NO: 519 - protein, 737 aa, Adeno-associated virus
MAADGYLPDWLEDNLSEGIREWWDLKPGAPKPKANQQKQDDGRGLVLPGYKYLGPFNGLDKGEPVNAADAAALEHDKAYDQQLKAGDNPYLRYNHADAEFQERLQEDTSFGGNLGRAVLQAKKRVLEPLGLVEEAAKTAPGKKRPVEPSPQRSPDSSTGIGKKGQQPARKRLNFGQTGDSESVPDPQPIGEPPAGPSGLGSGTMAAGGGAPMADNNEGADGVGNASGNWHCDSTWLGDRVITTSTRTWALPTYNNHLYKQISSQSAGSTNDNVYFGYSTPWGYFDFNRFHCHFSPRDWQRLINNNWGFRPKKLNFKLFNIQVKEVTTNDGVTTIANNLTSTVQVFSDSEYQLPYVLGSAHQGCLPPFPADVFMIPQYGYLTLNNGSQSVGRSSFYCLEYFPSQMLRTGNNFTFSYTFEDVPFHSSYAHSQSLDRLMNPLIDQYLYYLARTQSNAGGTAGNRELQFYQGGPTTMAEQAKNWLPGPCFRQQRVSKTLDQNNNSNFAWTGATKYHLNGRNSLVNPGVAMATHKDDEERFFPSSGVLIFGKTGAANKTTLENVLMTNEEEIRPTNPVATEEYGTVSSNLQAANTAAQTQVVNNQGALPGMVWQNRDVYLQGPIWAKIPHTDGNFHPSPLMGGFGLKHPPPQILIKNTPVPANPPEVFTPAKFASFITQYSTGQVSVEIEWELQKENSKRWNPEIQYTSNFDKQTGVDFAVDSQGVYSEPRPIGTRYLTRNL

SEQ ID NO: 520 - DNA, 2217 bp, Adeno-associated virus
atggctgccgatggttatcttccagattggctcgaggacaacctctctgagggcattcgcgagtggtgggacctgaaacctggagccccgaaacccaaagccaaccagcaaaagcaggacgacggccggggtctggtgcttcctggctacaagtacctcggacccttcaacggactcgacaagggggagcccgtcaacgcggcggacgcagcggccctcgagcacgacaaggcctacgaccagcagctcaaagcgggtgacaatccgtacctgcggtataatcacgccgacgccgagtttcaggagcgtctgcaagaagatacgtcttttgggggcaacctcgggcgagcagtcttccaggccaagaagcgggttctcgaacctctcggtctggttgaggaaggcgctaagacggctcctggaaagaagagaccggtagagccgtcaccacagcgttcccccgactcctccacgggcatcggcaagaaaggccagcagcccgccagaaagagactcaatttcggtcagactggcgactcagagtcagtccccgaccctcaacctatcggagaacctccagcagcgccctctagtgtgggatctggtacaatggctgcaggcggtggcgcaccaatggcagacaataacgaaggtgccgacggagtgggtagttcctcgggaaattggcattgcgattccacatggctgggcgacagagtcatcaccaccagcacccgaacctgggccctgcccacctacaacaaccacctctacaagcaaatctccaacgggacctcgggaggcagcaccaacgacaacacctactttggctacagcaccccctgggggtattttgactttaacagattccactgccacttctcaccacgtgactggcagcgactcatcaacaacaactggggattccggcccaagagactcagcttcaagctcttcaacatccaggtcaaagaggtcacgcagaatgaaggcaccaagaccatcgccaataacctcaccagcaccatccaggtgtttacggactcggaataccagctgccgtacgtcctcggctctgcccaccagggctgcctgcctccgttcccggcggacgtcttcatgattcctcagtacggctacctgactctcaacaacggtagtcaggccgtgggacgttcctccttctactgcctggagtacttcccctctcagatgctgagaacgggcaacaacttttccttcagctacactttcgaggacgtgcctttccacagcagctacgcgcacagccagagtttggacaggctgatgaatcctctcatcgaccagtacctgtactacctgtcaagaacccagtctacgggaggcacagcgggaacccagcagttgctgttttctcaggccgggcctagcaacatgtcggctcaggccagaaactggctgcctggaccctgctacagacagcagcgcgtctccacgacactgtcgcaaaacaacaacagcaactttgcctggactggtgccaccaagtatcatctgaacggcagagactctctggtgaatccgggcgtcgccatggcaaccaacaaggacgacgaggaccgcttcttcccacccagcggcatcctcatgtttggcaagcagggagctggaaaagacaacgtggactatagcaacgtgatgctaaccagcgaggaagaaatcaagaccaccaaccccgtggccacagaacagtatggcgtggtggctgataacctacagcagcaaaacaccgctcctattgtgggggccgtcaacagccagggagccttacctggcatggtctggcagaaccgggacgtgtacctgcagggtcctatttgggccaagattcctcacacagatggcaactttcacccgtctcctttaatgggcggctttggacttaaacatccgcctcctcagatcctcatcaaaaacactcctgttcctgcggatcctccaacagcgttcaaccaggccaagctgaattctttcatcacgcagtacagcaccggacaagtcagcgtggtgatcgagtgggagctgcagaaggagaacagcaagcgctggaacccagagattcagtatacttccaactactacaaatctacaaatgtggactttgctgttaatactgagggtgtttactctgagcttcgccccattggcactcgttacctcacccgtaatctgtaa

SEQ ID NO: 521 - protein, 738 aa, Adeno-associated virus
MAADGYLPDWLEDNLSEGIREWWDLKPGAPKPKANQQKQDDGRGLVLPGYKYLGPFNGLDKGEPVNAADAAALEHDKAYDQQLKAGDNPYLRYNHADAEFQERLQEDTSFGGNLGRAVFQAKKRVLEPLGLVEEGAKTAPGKKRPVEPSPQRSPDSSTGIGKKGQQPARKRLNFGQTGDSESVPDPQPIGEPPAAPSSVGSGTMAAGGGAPMADNNEGADGVGSSSGNWHCDSTWLGDRVITTSTRTWALPTYNNHLYKQISNGTSGGSTNDNTYFGYSTPWGYFDFNRFHCHFSPRDWQRLINNNWGFRPKRLSFKLFNIQVKEVTQNEGTKTIANNLTSTIQVFTDSEYQLPYVLGSAHQGCLPPFPADVFMIPQYGYLTLNNGSQAVGRSSFYCLEYFPSQMLRTGNNFSFSYTFEDVPFHSSYAHSQSLDRLMNPLIDQYLYYLSRTQSTGGTAGTQQLLFSQAGPSNMSAQARNWLPGPCYRQQRVSTTLSQNNNSNFAWTGATKYHLNGRDSLVNPGVAMATNKDDEDRFFPPSGILMFGKQGAGKDNVDYSNVMLTSEEEIKTTNPVATEQYGVVADNLQQQNTAPIVGAVNSQGALPGMVWQNRDVYLQGPIWAKIPHTDGNFHPSPLMGGFGLKHPPPQILIKNTPVPADPPTAFNQAKLNSFITQYSTGQVSVVIEWELQKENSKRWNPEIQYTSNYYKSTNVDFAVNTEGVYSELRPIGTRYLTRNL

SEQ ID NO: 522 - DNA, 2214 bp, Adeno-associated virus
atggctgctgacggttatcttccagattggctcgaggacaacctctctgagggcattcgcgagtggtgggacctgaaacctggagcccccaagcccaaggccaaccagcagaagcaggacgacggccggggtctggtgcttcctggctacaagtacctcggacccttcaacggactcgacaagggggagcccgtcaacgcggcggacgcagcggccctcgagcacgacaaggcctacgaccagcagctcaaagcgggtgacaatccgtacctgcggtataaccacgccgacgccgagtttcaggagcgtctgcaagaagatacgtcttttgggggcaacctcgggcgagcagtcttccaggccaagaagcgggttctcgaacctctcggtctggttgaggaagctgctaagacggctcctggaaagaagagaccggtagaaccgtcacctcagcgttcccccgactcctccacgggcatcggcaagaaaggccagcagcccgctagaaagagactgaactttgggcagactggcgactcagagtcagtccccgaccctcaaccaatcggagaaccaccagcaggcccctctggtctgggatctggtacaatggctgcaggcggtggcgccccaatggcagacaataacgaaggcgccgacggagtgggtaatgcctcaggaaattggcattgcgattccacatggctgggcgacagagtcatcaccaccagcacccgaacctgggctttgcccacctacaacaaccacctctacaagcaaatctccagtcagtcagcaggtagcaccaacgacaacgtctacttcggctacagcaccccctgggggtattttgacttcaacagattccactgtcacttctcaccacgtgactggcagcggctcatcaacaacaactggggattccggcccaagaagctcaacttcaagctgttcaacatccaggtcaaggaggtcacaacgaatgacggcgtcacgaccatcgccaataaccttaccagcacggttcaggtcttttcggactcggaataccagctgccctacgtcctcggctccgcacaccagggctgcctgcctccgttcccggcggacgtcttcatgattccccagtacggctacctgactctgaacaatggcagccaatcggtgggtcgttcctctttctactgcctggaatatttcccttctcaaatgctgagaacgggcaacaacttcaccatcagctacaccttcgaggacgttcccttccacagcagctacgcacacagccagagcctggaccggctgatgaatcctcttatcgaccagtacctgtattacctggccagaacacagagcaacgcaggaggcacagctggcaatcaggaactgcagttttatcagggcgggcctaccaccatggccgaacaagccaaaaactggctgcctggaccttgcttccggcaacaaagagtctccaagacgctggatcaaaacaacaacagcaactttgcttggactggtgccaccaaataccatctaaatggaagaaattcattggttaatcccggtgtcgccatggcaacccacaaggacgacgaggaacgcttcttcccttcgagcggagtcctgatttttggaaaaactggagcagctaataagactacactggaaaatgtgttaatgacaaatgaagaggaaattcgtcctaccaacccggtagccaccgaggaatacgggactgttagcagcaacctgcaggcggctaacactgcagcccagacacaagttgtcaacaaccagggagccttacctggtatggtctggcagaaccgggacgtgtacctgcagggtcccatctgggccaagattcctcacacagatggcaactttcacccgtctcctttaatgggcggctttggacttaaacatccgcctcctcagatcctcatcaaaaacactcctgttcctgcggatcctccaacagcgttcaaccaggccaagctgaattctttcatcacgcagtacagcaccggacaagtcagcgtggagatcgagtgggagctgcagaaggagaacagcaagcgctggaacccagagattcagtatacttccaactactacaaatctacaaatgtggactttgctgttaatactgagggtgtttactctgagcctcgccccattggcactcgttacctcacccgtaatctgtaa

SEQ ID NO: 523 - protein, 737 aa, Adeno-associated virus
MAADGYLPDWLEDNLSEGIREWWDLKPGAPKPKANQQKQDDGRGLVLPGYKYLGPFNGLDKGEPVNAADAAALEHDKAYDQQLKAGDNPYLRYNHADAEFQERLQEDTSFGGNLGRAVFQAKKRVLEPLGLVEEAAKTAPGKKRPVEPSPQRSPDSSTGIGKKGQQPARKRLNFGQTGDSESVPDPQPIGEPPAGPSGLGSGTMAAGGGAPMADNNEGADGVGNASGNWHCDSTWLGDRVITTSTRTWALPTYNNHLYKQISSQSAGSTNDNVYFGYSTPWGYFDFNRFHCHFSPRDWQRLINNNWGFRPKKLNFKLFNIQVKEVTTNDGVTTIANNLTSTVQVFSDSEYQLPYVLGSAHQGCLPPFPADVFMIPQYGYLTLNNGSQSVGRSSFYCLEYFPSQMLRTGNNFTISYTFEDVPFHSSYAHSQSLDRLMNPLIDQYLYYLARTQSNAGGTAGNQELQFYQGGPTTMAEQAKNWLPGPCFRQQRVSKTLDQNNNSNFAWTGATKYHLNGRNSLVNPGVAMATHKDDEERFFPSSGVLIFGKTGAANKTTLENVLMTNEEEIRPTNPVATEEYGTVSSNLQAANTAAQTQVVNNQGALPGMVWQNRDVYLQGPIWAKIPHTDGNFHPSPLMGGFGLKHPPPQILIKNTPVPADPPTAFNQAKLNSFITQYSTGQVSVEIEWELQKENSKRWNPEIQYTSNYYKSTNVDFAVNTEGVYSEPRPIGTRYLTRNL

SEQ ID NO: 524 - DNA, 2217 bp, Adeno-associated virus
atggctgccgatggttatcttccagattggctcgaggacaacctctctgagggcattcgcgagtggtgggacctgaaacctggagccccgaaacccaaagccaaccagcaaaagcaggacgacggccggggtctggtgcttcctggctacaagtacctcggacccttcaacggactcgacaagggggagcccgtcaacgcggcggacgcagcggccctcgagcacgacaaggcctacgaccagcagctcaaagcgggtgacaatccgtacctgcggtataatcacgccgacgccgagtttcaggagcgtctgcaagaagatacgtcttttgggggcaacctcgggcgagcagtcttccaggccaagaagcgggttctcgaacctctcggtctggttgaggaaggcgctaagacggctcctggaaagaagagaccggtagagccgtcaccacagcgttcccccgactcctccacgggcatcggcaagaaaggccagcagcccgccagaaagagactcaatttcggtcagactggcgactcagagtcagtccccgaccctcaacctatcggagaacctccagcagcgccctctagtgtgggatctggtacaatggctgcaggcggtggcgcaccaatggcagacaataacgaaggtgccgacggagtgggtagttcctcgggaaattggcattgcgattccacatggctgggcgacagagtcatcaccaccagcacccgaacctgggccctgcccgcctacaacaaccacctctacaagcaaatctccaacgggacctcgggaggcagcaccaacgacaacacctactttggctacagcaccccctgggggtattttgactttaacagattccactgccacttctcaccacgtgactggcagcgactcatcaacaacaactggggattccggcccaagagactcagcttcaagctcttcaacatccaggtcaaagaggtcacgcagaatgaaggcaccaagaccatcgccaataacctcaccagcaccatccaggtgtttacggactcggaataccagctgccgtacgtcctcggctctgcccaccagggctgcctgcctccgttcccggcggatgtcttcatgattcctcagtacggctacctgactctcaacaacggtagtcaggccgtgggacgttcctccttctactgcctggagtacttcccctctcagatgctgagaacgggcaacaacttttccttcagctacactttcgaggacgtgcctttccacagcagctacgcgcacagccagagtttggacaggctgatgaatcctctcatcgaccagtacctgtactacctgtcaagaacccagtctacgggaggcacagcgggaacccagcagttgctgttttctcaggccgggcctagcaacatgtcggctcaggccagaaactggctgcctggaccctgctacagacagcagcgcgtctccacgacactgtcgcaaaacaacaacagcaactttgcctggactggtgccaccaagtatcatctgagcggcagagactctctggtgaatccgggcgtcgccatggcaaccaacaaggacgacgaggaccgcttcttcccatccagcggcatcctcatgtttggcaagcagggagctggaaaagacaacgtggactatagcaacgtgatgctaaccagcgaggaagaaatcaagaccaccaaccccgtggccacagaacagtatggcgtggtggctgataacctacagcagcaaaacaccgctcctattgtgggggccgtcaacagccagggagccttacctggcatggtctggcagaaccgggacgtgtacctgcagggtcctatttgggccaagattcctcacacagatggcaactttcacccgtctcctttaatgggcggctttggacttaaacatccgcctcctcagatcctcatcaaaaacactcctgttcctgcggatcctccaacagcgttcaaccaggccaagctgaattcttccatcacgcagtacagcaccggacaagtcagcgtggagatcgagtgggagctgcagaaggagaacagcaagcgctggaacccagagattcagtatacttccaactactacaaatctacaaatgtggactttgctgttaatactgagggtgtttactctgagcctcgccccattggcactcgttacctcacccgtaatttgtaa

SEQ ID NO: 525 - protein, 738 aa, Adeno-associated virus
MAADGYLPDWLEDNLSEGIREWWDLKPGAPKPKANQQKQDDGRGLVLPGYKYLGPFNGLDKGEPVNAADAAALEHDKAYDQQLKAGDNPYLRYNHADAEFQERLQEDTSFGGNLGRAVFQAKKRVLEPLGLVEEGAKTAPGKKRPVEPSPQRSPDSSTGIGKKGQQPARKRLNFGQTGDSESVPDPQPIGEPPAAPSSVGSGTMAAGGGAPMADNNEGADGVGSSSGNWHCDSTWLGDRVITTSTRTWALPAYNNHLYKQISNGTSGGSTNDNTYFGYSTPWGYFDFNRFHCHFSPRDWQRLINNNWGFRPKRLSFKLFNIQVKEVTQNEGTKTIANNLTSTIQVFTDSEYQLPYVLGSAHQGCLPPFPADVFMIPQYGYLTLNNGSQAVGRSSFYCLEYFPSQMLRTGNNFSFSYTFEDVPFHSSYAHSQSLDRLMNPLIDQYLYYLSRTQSTGGTAGTQQLLFSQAGPSNMSAQARNWLPGPCYRQQRVSTTLSQNNNSNFAWTGATKYHLSGRDSLVNPGVAMATNKDDEDRFFPSSGILMFGKQGAGKDNVDYSNVMLTSEEEIKTTNPVATEQYGVVADNLQQQNTAPIVGAVNSQGALPGMVWQNRDVYLQGPIWAKIPHTDGNFHPSPLMGGFGLKHPPPQILIKNTPVPADPPTAFNQAKLNSSITQYSTGQVSVEIEWELQKENSKRWNPEIQYTSNYYKSTNVDFAVNTEGVYSEPRPIGTRYLTRNL

SEQ ID NO: 526 - protein, 736 aa, Adeno-associated virus; identical to SEQ ID NO: 26

SEQ ID NO: 527 - DNA, 2217 bp, Adeno-associated virus
atggctgctgacggttatcttccagattggctcgaggacaacctctctgagggcattcgcgagtggtgggacctgaaacctggagcccccaagcccaaggccaaccagcagaagcaggacgacggccggggtctggtgcttcctggctacaagtacctcggacccttcaacggactcgacaagggggagcccgtcaacgcggcggacgcagcggccctcgagcacgacaaggcctacgaccagcagctcaaagcgggtgacaatccgtacctgcggtataaccacgccgacgccgagtttcaggagcgtctgcaagaagatacgtcttttgggggcaacctcgggcgagcagtcttccaggccaagaagcgggttctcgaacctctcggtctggttgaggaagctgctaagacggctcctggaaagaagagaccggtagaaccgtcacctcagcgttcccccgactcctccacgggcatcggcaagaaaggccagcagcccgctaaaaagagactgaactttggtcagactggcgactcagagtcagtccccgaccctcaaccaatcggagaaccaccagcaggcccctctggtctgggatctggtacaatggctgcaggcggtggcgctccaatggcagacaataacgaaggcgccgacggagtgggtagttcctcaggaaattggcattgcgattccacatggctgggcgacagagtcatcaccaccagcacccgaacctgggccctgcccacctacaacaaccacctctacaagcaaatatccaatgggacatcgggaggaagcaccaacgacaacacctacttcggctacagcaccccctgggggtattttgacttcaacagattccactgccacttctcaccacgtgactggcagcgactcatcaacaacaactggggattccggccaaaaagactcagcttcaagctcttcaacatccaggtcaaggaggtcacgcagaatgaaggcaccaagaccatcgccaataaccttaccagcacgattcaggtatttacggactcggaataccagctgccgtacgtcctcggctccgcgcaccagggctgcctgcctccgttcccggcggacgtcttcatgattccccagtacggctaccttacactgaacaatggaagtcaagccgtaggccgttcctccttctactgcctggaatattttccatctcaaatgctgcgaactggaaacaattttgaattcagctacaccttcgaggacgtgcctttccacagcagctacgcacacagccagagcttggaccgactgatgaatcctctcatcgaccagtacctgtactacttatccagaactcagtccacaggaggaactcaaggtacccagcaattgttattttctcaagctgggcctgcaaacatgtcggctcaggctaagaactggctacctggaccttgctaccggcagcagcgagtctctacgacactgtcgcaaaacaacaacagcaactttgcttggactggtgccaccaaatatcacctgaacggaagagactctttggtaaatcccggtgtcgccatggcaacccacaaggacgacgaggaacgcttcttcccgtcgagtggagtcctgatgtttggaaaacagggtgctggaagagacaatgtggactacagcagcgttatgctaaccagcgaagaagaaattaaaaccactaaccctgtagccacagaacaatacggtgtggtggctgacaacttgcagcaaaccaatacagggcctattgtgggaaatgtcaacagccaaggagccttacctggcatggtctggcagaaccgagacgtgtacctgcagggtcccatctgggccaagattcctcacacggacggcaacttccacccttcaccgctaatgggaggatttggactgaagcacccacctcctcagatcctgatcaagaacacgccggtacctgcggatcctccaacaacgttcagccaggcgaaattggcttccttcattacgcagtacagcaccggacaggtcagcgtggaaatcgagtgggagctgcagaaggagaacagcaaacgctggaacccagagattcagtacacttcaaactactacaaatctacaaatgtggactttgctgtcaatacagagggaacttattctgagcctcgccccattggtactcgttacctcacccgtaatctgtaa

SEQ ID NO: 528 - protein, 738 aa, Adeno-associated virus
MAADGYLPDWLEDNLSEGIREWWDLKPGAPKPKANQQKQDDGRGLVLPGYKYLGPFNGLDKGEPVNAADAAALEHDKAYDQQLKAGDNPYLRYNHADAEFQERLQEDTSFGGNLGRAVFQAKKRVLEPLGLVEEGAKTAPGKKRPVEPSPQRSPDSSTGIGKKGQQPARKRLNFGQTGDSESVPDPQPLGEPPAAPSSVGSGTMAAGGGAPMADNNEGADGVGSSSGNWHCDSTWLGDRVITTSTRTWALPTYNNHLYKQISNGTSGGSTNDNTYFGYSTPWGYFDFNRFHCHFSPRDWQRLINNNWGFRPKRLSFKLFNIQVKEVTQNEGTKTIANNLTSTIQVFTDSEYQLPYVLGSAHQGCLPPFPADVFMIPQYGYLTLNNGSQAVGRSSFYCLEYFPSQMLRTGNNFSFSYTFEDVPFHSSYAHSQSLDRLMNPLIDQYLYYLSRTQSTGGTAGTQQLLFSQAGPSNMSAQARNWLPGPCYRQQRVSTTLSQNNNSNFAWTGATKYHLNGRDSLVNPGVAMATNKDDEDRFFPSSGILMFGKQGAGKDNVDYSNVMLTSEEEIKTTNPVATEQYGVVADNLQRQNTAPIVGAVNSQGALPGMVWQNRDVYLQGPIWAKIPHTDGNFHPSPLMGGFGLKHPPPQILIKNTPVPADPPTAFNQAKLNSFITQYSTGQVSVEIEWELQKENSKRWNPEIQYTSNYYKSTNVDFAVNTEGVYSEPRPIGTRYLTRNL

SEQ ID NO: 529 - protein, 736 aa, Adeno-associated virus
MAADGYLPDWLEDNLSEGIREWLNLKPGAPQPKANQQKQDNARGLVLPGYKYLGPFNGLDKGDPVNEADAAALEHDKAYGQQLKAGDNPYLKYNHADAEFQERLQKDTSFGGNLGKAVFQAKKRILEPLGLVETPAKTAPGKKRPVDPSPQRSPDSSSGIGKKSPHPARKRLNFGQTGEAESVPDPQPIGEPPSDPSSVGSGTMAAGGGAPMADNNEGADGVGNSSGNWHCDSTWLGDRVITTSTRTWALPTYNNHLYKQISSQSGATNDNHYFGYSTPWGYFDFNRFHCHFSPRDWQRLINNNWGFRPKRLSFKLFNIQVKEVTQNDGTTTIANNLTSTVQVFTDSEYQLPYVLGSAHQGCLPPFPADVFMIPQYGYLTLNNGSQAVGRSSFYCLEYFPSQMLRTGNNFQFSYTFEDVPFHSSYAHSQSLDRLMNPLIDQYLYYLSKTQGTNATVQGAKLQFSQAGPSNMRDQARNWLPGPCYRQQRVSKTANDNNNSEYAWTGATKYHLNGRDSLVNPGPAMASHKDDEEKFFPMNGTLVFGKNGAGNSNVDIENVMITDEEEIRTTNPVATEQYGVVSDNLQSSNTRPITGDVDSQGVLPGMVWQDRDVYLQGPIWAKIPHTDGHFHPSPLMGGFGLKHPPPQILIKNTPVPANPATTFTPGKFASFITQYSTGQVSVQIEWELQKENSKRWNPEIQYTSNYNKSVNVDFTVDTNGVYSEPRPIGTRYLTRNL

SEQ ID NO: 530 - protein, 736 aa, Adeno-associated virus; identical to SEQ ID NO: 105

SEQ ID NO: 531 - protein, 736 aa, Adeno-associated virus
MAADGYLPDWLEDNLSEGIREWWDLKPGAPKPKANQQKQDDGRGLVLPGYKYLGPFNGLDKGEPVNAADAAALEHDKAYDQQLKAGDNPYLRYNHADAEFQERLQEDTSFGGNLGRAVFQAKKRVLEPLGLVEEGAKTAPGKKRPVEQSPQEPDSSSGIGKTGQQPAKKRLNFGQTGDSESVPDPQPLGEPPAAPSGLGPNTMASGGGAPMADNNEGADGVGNSSGNWHCDSTWLGDRVITTSTRTWALPTYNNHLYKQISNGTSGGSTNDNTYFGYSTPWGYFDFNRFHCHFSPRDWQRLINNNWGFRPKRLNFKLFNIQVKEVTTNEGTKTIANNLTSTVQVFTDSEYQLPYVLGSAHQGCLPPFPADVFMVPQYGYLTLNNGSQALGRSSFYCLEYFPSQMLRTGNNFQFSYTFEDVPFHSSYAHSQSLDRLMNPLIDQYLYYLVRTQTTGTGGTQTLAFSQAGPSSMANQARNWVPGPCYRQQRVSTTTNQNNNSNFAWTGAAKFKLNGRDSLMNPGVAMASHKDDEDRFFPSSGVLIFGKQGAGNDGVDYSQVLITDEEEIKATNPVATEEYGAVAINNQAANTQAQTGLVHNQGVIPGMVWQNRDVYLQGPIWAKIPHTDGNFHPSPLMGGFGLKHPPPQILIKNTPVPADPPLTFNQAKLNSFITQYSTGQVSVEIEWELQKENSKRWNPEIQYTSNYYKSTNVDFAVNTEGVYSEPRPIGTRYLTRNL

SEQ ID NO: 532 - protein, 736 aa, Artificial Sequence; identical to SEQ ID NO: 531
  Description of Artificial Sequence: Synthetic polypeptide

SEQ ID NO: 533 - protein, 736 aa, Artificial Sequence
  Description of Artificial Sequence: Synthetic polypeptide
MAADGYLPDWLEDNLSEGIREWWDLKPGAPKPKANQQKQDDGRGLVLPGYKYLGPFNGLDKGEPVNAADAAALEHDKAYDQQLKAGDNPYLRYNHADAEFQERLQEDTSFGGNLGRAVFQAKKRVLEPLGLVEEGAKTAPGKKRPVEQSPQEPDSSSGIGKTGQQPAKKRLNFGQTGDSESVPDPQPLGEPPAAPSGLGPNTMASGGGAPMADNNEGADGVGNSSGNWHCDSTWLGDRVITTSTRTWALPTYNNHLYKQISNGTSGGSTNDNTYFGYSTPWGYFDFNRFHCHFSPRDWQRLINNNWGFRPKRLNFKLFNIQVKEVTTNEGTKTIANNLTSTVQVFTDSEYQLPYVLGSAHQGCLPPFPADVFMVPQYGYLTLNNGSQALGRSSFYCLEYFPSQMLRTGNNFQFSYTFEDVPFHSSYAHSQSLDRLMNPLIDQYLYYLVRTQTTGTGGTQTLAFSQAGPSSMANQARNWVPGPCYRQQRVSTTTNQNNNSNFAWTGAAKFKLNGRDSLMNPGVAMASHKDDEDRFFPSSGVLIFGKQGAGNDGVDYSQVLITDEEEIKATNPVATEEYGAVAINNQRANTQAQTGLVHNQGVIPGMVWQNRDVYLQGPIWAKIPHTDGNFHPSPLMGGFGLKHPPPQILIKNTPVPADPPLTFNQAKLNSFITQYSTGQVSVEIEWELQKENSKRWNPEIQYTSNYYKSTNVDFAVNTEGVYSEPRPIGTRYLTRNL

SEQ ID NO: 534 - protein, 736 aa, Artificial Sequence
  Description of Artificial Sequence: Synthetic polypeptide
MAADGYLPDWLEDNLSEGIREWWDLKPGAPKPKANQQKQDDGRGLVLPGYKYLGPFNGLDKGEPVNAADAAALEHDKAYDQQLKAGDNPYLRYNHADAEFQERLQEDTSFGGNLGRAVFQAKKRVLEPLGLVEEGAKTAPGKKRPVEQSPQEPDSSSGIGKTGQQPAKKRLNFGQTGDSESVPDPQPLGEPPAAPSGLGPNTMASGGGAPMADNNEGADGVGNSSGNWHCDSTWLGDRVITTSTRTWALPTYNNHLYKQISNGTSGGSTNDNTYFGYSTPWGYFDFNRFHCHFSPRDWQRLINNNWGFRPKRLNFKLFNIQVKEVTTNEGTKTIANNLTSTVQVFTDSEYQLPYVLGSAHQGCLPPFPADVFMVPQYGYLTLNNGSQALGRSSFYCLEYFPSQMLRTGNNFQFSYTFEDVPFHSSYAHSQSLDRLMNPLIDQYLYYLVRTQTTGTGGTQTLAFSQAGPSSMANQARNWVPGPCYRQQRVSTTTNQNNNSNFAWTGAAKFKLNGRDSLMNPGVAMASHKDDEDAFFPSSGVLIFGKQGAGNDGVDYSQVLITDEEEIKATNPVATEEYGAVAINNQAANTQAQTGLVHNQGVIPGMVWQNRDVYLQGPIWAKIPHTDGNFHPSPLMGGFGLKHPPPQILIKNTPVPADPPLTFNQAKLNSFITQYSTGQVSVEIEWELQKENSKRWNPEIQYTSNYYKSTNVDFAVNTEGVYSEPRPIGTRYLTRNL

SEQ ID NO: 535 - DNA, 1803 bp, Bovine adeno-associated virus
acggcgcctgcggcaaaaaagaggcctctagagcagagtcctcaagagccagactcctcgagcggagttggcaagaaaggcaaacagcctgccagaaagagactcaactttgacgacgaacctggagccggagacgggcctcccccagaaggaccatcttccggagctatgtctactgagactgaaatgcgtgcagcagctggcggaaatggtggcgatgcgggacaaggtgccgagggagtgggtaatgcctccggtgattggcattgcgattccacttggtcagagagccacgtcaccaccacctcaacccgcacctgggtcctgccgacctacaacaaccacctgtacctgcggctcggctcgagcaacgccagcgacaccttcaacggattctccaccccctggggatactttgactttaaccgcttccactgccacttctcgccaagagactggcaaaggctcatcaacaaccactggggactgcgccccaaaagcatgcaagtccgcatcttcaacatccaagttaaggaggtcacgacgtctaacggggagacgaccgtatccaacaacctcaccagcacggtccagatctttgcggacagcacgtacgagctcccgtacgtgatggatgcaggtcaggagggcagcttgcctcctttccccaacgacgtgttcatggtgcctcagtacgggtactgcggactggtaaccggaggcagctctcaaaaccagacagacagaaatgccttctactgtctggagtactttcccagccagatgctgagaaccggaaacaactttgagatggtgtacaagtttgaaaacgtgcccttccactccatgtacgctcacagccagagcctggataggctgatgaacccgctgctggaccagtacctgtgggagctccagtctaccacctctggaggaactctcaaccagggcaattcagccaccaactttgccaagctgaccaaaacaaacttttctggctaccgcaaaaactggctcccggggcccatgatgaagcagcagagattctccaagactgccagtcaaaactacaagattccccagggaagaaacaacagtctgctccattatgagaccagaactaccctcgacggaagatggagcaattttgccccgggaacggccatggcaaccgcagccaacgacgccaccgacttctctcaggcccagctcatctttgcggggcccaacatcaccggcaacaccaccacagatgccaataacctgatgttcacttcagaagatgaacttagggccaccaacccccgggacactgacctgtttggccacctggcaaccaaccagcaaaacgccaccaccgttcctaccgtagacgacgtggacggagtcggcgtgtacccgggaatggtgtggcaggacagagacatttactaccaagggcccatttgggccaaaattccacacacggatggacactttcacccgtctcctctcattggcggatttggactgaaaagcccgcctccacaaatattcatcaaaaacactcctgtacccgccaatcccgcaacgaccttctctccggccagaatcaacagcttcatcacccagtacagcaccggacaggtggctgtcaaaatagaatgggaaatccagaaggagcggtccaagagatggaacccagaggtccagttcacgtccaactacggagcacaggactcgcttctctgggctcccgacaacgccggagcctacaaagagcccagggccattggatcccgatacctcaccaaccacctctag

SEQ ID NO: 536 - DNA, 1617 bp, Bovine adeno-associated virus
atgcgtgcagcagctggcggaaatggtggcgatgcgggacaaggtgccgagggagtgggtaatgcctccggtgattggcattgcgattccacttggtcagagagccacgtcaccaccacctcaacccgcacctgggtcctgccgacctacaacaaccacctgtacctgcggctcggctcgagcaacgccagcgacaccttcaacggattctccaccccctggggatactttgactttaaccgcttccactgccacttctcgccaagagactggcaaaggctcatcaacaaccactggggactgcgccccaaaagcatgcaagtccgcatcttcaacatccaagttaaggaggtcacgacgtctaacggggagacgaccgtatccaacaacctcaccagcacggtccagatctttgcggacagcacgtacgagctcccgtacgtgatggatgcaggtcaggagggcagcttgcctcctttccccaacgacgtgttcatggtgcctcagtacgggtactgcggactggtaaccggaggcagctctcaaaaccagacagacagaaatgccttctactgtctggagtactttcccagccagatgctgagaaccggaaacaactttgagatggtgtacaagtttgaaaacgtgcccttccactccatgtacgctcacagccagagcctggataggctgatgaacccgctgctggaccagtacctgtgggagctccagtctaccacctctggaggaactctcaaccagggcaattcagccaccaactttgccaagctgaccaaaacaaacttttctggctaccgcaaaaactggctcccggggcccatgatgaagcagcagagattctccaagactgccagtcaaaactacaagattccccagggaagaaacaacagtctgctccattatgagaccagaactaccctcgacggaagatggagcaattttgccccgggaacggccatggcaaccgcagccaacgacgccaccgacttctctcaggcccagctcatctttgcggggcccaacatcaccggcaacaccaccacagatgccaataacctgatgttcacttcagaagatgaacttagggccaccaacccccgggacactgacctgtttggccacctggcaaccaaccagcaaaacgccaccaccgttcctaccgtagacgacgtggacggagtcggcgtgtacccgggaatggtgtggcaggacagagacatttactaccaagggcccatttgggccaaaattccacacacggatggacactttcacccgtctcctctcattggcggatttggactgaaaagcccgcctccacaaatattcatcaaaaacactcctgtacccgccaatcccgcaacgaccttctctccggccagaatcaacagcttcatcacccagtacagcaccggacaggtggctgtcaaaatagaatgggaaatccagaaggagcggtccaagagatggaacccagaggtccagttcacgtccaactacggagcacaggactcgcttctctgggctcccgacaacgccggagcctacaaagagcccagggccattggatcccgatacctcaccaaccacctctag

SEQ ID NO: 537 - DNA, 1173 bp, Bovine adeno-associated virus
atggcgctggtaagctggctggtggaacatggcatcacttccgagaagcagtggattcaggagaatcaggagagctacctgtccttcaactccacgggaaactctcggagccagattaaagccgcgcttgacaacgcgtcaaaaattatgagtctgaccaaatctgcctcagactatctcgtgggacagactgttccagaggacatttctgaaaacagaatctggcagatttttgatctcaacggctacgacccggcatacgcgggctctgttctctacggctggtgcactcgcgcctttggaaagaggaacaccgtctggctgtatggacccgcgaccaccggaaagaccaacatcgcggaagccatctctcacaccgtgcccttttatggctgtgtgaactggactaatgagaactttccctttaatgactgtgtggaaaaaatgttgatctggtgggaggagggaaagatgaccagcaaggtggtggaacccgccaaggccatcttgggggggtctagagtacgagtggatcaaaaatgtaaatcctctgtacaagtagactctaccccggtgattatcacctccaatactaacatgtgtgtggtggtggatgggaactccacgacctttgaacaccagcagccgctggaagaccgcatgttcagatttgaactcatgcggcggctcccgccagattttggcaagattaccaagcaggaagtcaaagacttttttgcttgggcaaaggtcaaccaggtgccggtgactcacgagtttatggttcccaagaaagtggcgggaactgagagggcggagacttctagaaaacgcccactggatgacgtcaccaataccaactataaaagtccggagaagcgggcccggctctcagttgttcctgagacgcctcgcagttcagacgtgcctgtagagcccgctcctctgcgacctctcaactggtcttccaggtatgaatgcagatgtgactatcatgctaaatttgactctgtaacgggggaatgtgacgagtgtgaatatttgaatcggggcaaaaatggctgtatctttcataatgctacacattgtcaaatttgtcacgctgttcctccatgggaaaaggaaaatgtgtcagattttaatgattttgatgactgtaataaagagcagtaa

SEQ ID NO: 538 - DNA, 1833 bp, Bovine adeno-associated virus
atggctaccttctatgaagtcattgttcgcgttccatttgatgtggaagagcacctgcctggaatttctgacaactttgtagactgggtaactggtcaaatttgggagctgcctcccgagtcagatttgaatttgactctgattgagcagcctcagctgacggtggctgacagaattcgccgcgtgttcctgtacgagtggaacaaattttccaagcaggagagcaaattctttgtgcagtttgaaaagggatctgaatattttcatctgcacacgctcgtggagacctccggcatctcttctatggtccttggccgctacgtgagtcagattcgcgcccagctggtgaaggtggtgttccagaacattgagccgcggattaacgactgggtcgccatcaccaaggtaaagaagggcggagccaataaggtggtggattctgggtatattcccgcctacctgctgccgaaggtccaaccagagcttcagtgggcgtggactaacctcgaagagtataaattggccgccctcaatctggaggagcgcaaacggctcgtcgctcagtttcagcttgagtcctcgcagcgctcgcaagaggcatcttcccagagggacgtttcggctgacccggtcatcaagagcaagacttcccagaaatacatggcgctggtaagctggctggtggaacatggcatcacttccgagaagcagtggattcaggagaatcaggagagctacctgtccttcaactccacgggaaactctcggagccagattaaagccgcgcttgacaacgcgtcaaaaattatgagtctgaccaaatctgcctcagactatctcgtgggacagactgttccagaggacatttctgaaaacagaatctggcagatttttgatctcaacggctacgacccggcatacgcgggctctgttctctacggctggtgcactcgcgcctttggaaagaggaacaccgtctggctgtatggacccgcgaccaccggaaagaccaacatcgcggaagccatctctcacaccgtgcccttttatggctgtgtgaactggactaatgagaactttccctttaatgactgtgtggaaaaaatgttgatctggtgggaggagggaaagatgaccagcaaggtggtggaacccgccaaggccatcttgggggggtctagagtacgagtggatcaaaaatgtaaatcctctgtacaagtagactctaccccggtgattatcacctccaatactaacatgtgtgtggtggtggatgggaactccacgacctttgaacaccagcagccgctggaagaccgcatgttcagatttgaactcatgcggcggctcccgccagattttggcaagattaccaagcaggaagtcaaagacttttttgcttgggcaaaggtcaaccaggtgccggtgactcacgagtttatggttcccaagaaagtggcgggaactgagagggcggagacttctagaaaacgcccactggatgacgtcaccaataccaactataaaagtccggagaagcgggcccggctctcagttgttcctgagacgcctcgcagttcagacgtgcctgtagagcccgctcctctgcgacctctcaactggtcttccaggtatgaatgcagatgtgactatcatgctaaatttgactctgtaacgggggaatgtgacgagtgtgaatatttgaatcggggcaaaaatggctgtatctttcataatgctacacattgtcaaatttgtcacgctgttcctccatgggaaaaggaaaatgtgtcagattttaatgattttgatgactgtaataaagagcagtaa

SEQ ID NO: 539 - DNA, 2211 bp, Bovine adeno-associated virus
atgtcttttgttgaccaccctccagattggttggaatcgatcggcgacggctttcgtgaatttctcggccttgaggcgggtcccccgaaacccaaggccaatcaacagaagcaagataacgctcgaggtcttgtgcttcctgggtacaagtatcttggtcctgggaacggccttgataagggcgatcctgtcaattttgctgacgaggttgcccgagagcacgacctctcctaccagaaacagcttgaggcgggcgataacccttacctcaagtacaaccacgcggacgcagagtttcaggagaaactcgcttctgacacttcttttgggggaaaccttgggaaggctgttttccaggctaaaaagaggattctcgaacctcttggcctggttgagacgccggataaaacggcgcctgcggcaaaaaagaggcctctagagcagagtcctcaagagccagactcctcgagcggagttggcaagaaaggcaaacagcctgccagaaagagactcaactttgacgacgaacctggagccggagacgggcctcccccagaaggaccatcttccggagctatgtctactgagactgaaatgcgtgcagcagctggcggaaatggtggcgatgcgggacaaggtgccgagggagtgggtaatgcctccggtgattggcattgcgattccacttggtcagagagccacgtcaccaccacctcaacccgcacctgggtcctgccgacctacaacaaccacctgtacctgcggctcggctcgagcaacgccagcgacaccttcaacggattctccaccccctggggatactttgactttaaccgcttccactgccacttctcgccaagagactggcaaaggctcatcaacaaccactggggactgcgccccaaaagcatgcaagtccgcatcttcaacatccaagttaaggaggtcacgacgtctaacggggagacgaccgtatccaacaacctcaccagcacggtccagatctttgcggacagcacgtacgagctcccgtacgtgatggatgcaggtcaggagggcagcttgcctcctttccccaacgacgtgttcatggtgcctcagtacgggtactgcggactggtaaccggaggcagctctcaaaaccagacagacagaaatgccttctactgtctggagtactttcccagccagatgctgagaaccggaaacaactttgagatggtgtacaagtttgaaaacgtgcccttccactccatgtacgctcacagccagagcctggataggctgatgaacccgctgctggaccagtacctgtgggagctccagtctaccacctctggaggaactctcaaccagggcaattcagccaccaactttgccaagctgaccaaaacaaacttttctggctaccgcaaaaactggctcccggggcccatgatgaagcagcagagattctccaagactgccagtcaaaactacaagattccccagggaagaaacaacagtctgctccattatgagaccagaactaccctcgacggaagatggagcaattttgccccgggaacggccatggcaaccgcagccaacgacgccaccgacttctctcaggcccagctcatctttgcggggcccaacatcaccggcaacaccaccacagatgccaataacctgatgttcacttcagaagatgaacttagggccaccaacccccgggacactgacctgtttggccacctggcaaccaaccagcaaaacgccaccaccgttcctaccgtagacgacgtggacggagtcggcgtgtacccgggaatggtgtggcaggacagagacatttactaccaagggcccatttgggccaaaattccacacacggatggacactttcacccgtctcctctcattggcggatttggactgaaaagcccgcctccacaaatattcatcaaaaacactcctgtacccgccaatcccgcaacgaccttctctccggccagaatcaacagcttcatcacccagtacagcaccggacaggtggctgtcaaaatagaatgggaaatccagaaggagcggtccaagagatggaacccagaggtccagttcacgtccaactacggagcacaggactcgcttctctgggctcccgacaacgccggagcctacaaagagcccagggccattggatcccgatacctcaccaaccacctctag

SEQ ID NO: 540 - DNA, 4694 bp, Bovine adeno-associated virus
gtggcactcccccccctgtcgcgttcgctcgttcgctggctcgattgggggggtggcagctcaaagagctgccagacgacggccctctgggccgtcgcccccccaatcgagccagcgaacgagcgaacgcgacaggggggggagtgccacactctctagcaagggggttttgtaggtggtgatgtcattgttgatgtcattatagttgtcacgcgatagttaatgattaacagtcatgtgatgtgtgttatccaataggatgaaagcgcgcgaatgagatctcgcgagacttccggggtataaaaggggtgagtgaacgagcccgccgccattctctgctctggactgctagaggaccctcgctgccatggctaccttctatgaagtcattgttcgcgttccatttgatgtggaagagcacctgcctggaatttctgacaactttgtagactgggtaactggtcaaatttgggagctgcctcccgagtcagatttgaatttgactctgattgagcagcctcagctgacggtggctgacagaattcgccgcgtgttcctgtacgagtggaacaaattttccaagcaggagagcaaattctttgtgcagtttgaaaagggatctgaatattttcatctgcacacgctcgtggagacctccggcatctcttctatggtccttggccgctacgtgagtcagattcgcgcccagctggtgaaggtggtgttccagaacattgagccgcggattaacgactgggtcgccatcaccaaggtaaagaagggcggagccaataaggtggtggattctgggtatattcccgcctacctgctgccgaaggtccaaccagagcttcagtgggcgtggactaacctcgaagagtataaattggccgccctcaatctggaggagcgcaaacggctcgtcgctcagtttcagcttgagtcctcgcagcgctcgcaagaggcatcttcccagagggacgtttcggctgacccggtcatcaagagcaagacttcccagaaatacatggcgctggtaagctggctggtggaacatggcatcacttccgagaagcagtggattcaggagaatcaggagagctacctgtccttcaactccacgggaaactctcggagccagattaaagccgcgcttgacaacgcgtcaaaaattatgagtctgaccaaatctgcctcagactatctcgtgggacagactgttccagaggacatttctgaaaacagaatctggcagatttttgatctcaacggctacgacccggcatacgcgggctctgttctctacggctggtgcactcgcgcctttggaaagaggaacaccgtctggctgtatggacccgcgaccaccggaaagaccaacatcgcggaagccatctctcacaccgtgcccttttatggctgtgtgaactggactaatgagaactttccctttaatgactgtgtggaaaaaatgttgatctggtgggaggagggaaagatgaccagcaaggtggtggaacccgccaaggccatcttgggggggtctagagtacgagtggatcaaaaatgtaaatcctctgtacaagtagactctaccccggtgattatcacctccaatactaacatgtgtgtggtggtggatgggaactccacgacctttgaacaccagcagccgctggaagaccgcatgttcagatttgaactcatgcggcggctcccgccagattttggcaagattaccaagcaggaagtcaaagacttttttgcttgggcaaaggtcaaccaggtgccggtgactcacgagtttatggttcccaagaaagtggcgggaactgagagggcggagacttctagaaaacgcccactggatgacgtcaccaataccaactataaaagtccggagaagcgggcccggctctcagttgttcctgagacgcctcgcagttcagacgtgcctgtagagcccgctcctctgcgacctctcaactggtcttccaggtatgaatgcagatgtgactatcatgctaaatttgactctgtaacgggggaatgtgacgagtgtgaatatttgaatcggggcaaaaatggctgtatctttcataatgctacacattgtcaaatttgtcacgctgttcctccatgggaaaaggaaaatgtgtcagattttaatgattttgatgactgtaataaagagcagtaaataaagtgagtagtcatgtcttttgttgaccaccctccagattggttggaatcgatcggcgacggctttcgtgaatttctcggccttgaggcgggtcccccgaaacccaaggccaatcaacagaagcaagataacgctcgaggtcttgtgcttcctgggtacaagtatcttggtcctgggaacggccttgataagggcgatcctgtcaattttgctgacgaggttgcccgagagcacgacctctcctaccagaaacagcttgaggcgggcgataacccttacctcaagtacaaccacgcggacgcagagtttcaggagaaactcgcttctgacacttcttttgggggaaaccttgggaaggctgttttccaggctaaaaagaggattctcgaacctcttggcctggttgagacgccggataaaacggcgcctgcggcaaaaaagaggcctctagagcagagtcctcaagagccagactcctcgagcggagttggcaagaaaggcaaacagcctgccagaaagagactcaactttgacgacgaacctggagccggagacgggcctcccccagaaggaccatcttccggagctatgtctactgagactgaaatgcgtgcagcagctggcggaaatggtggcgatgcgggacaaggtgccgagggagtgggtaatgcctccggtgattggcattgcgattccacttggtcagagagccacgtcaccaccacctcaacccgcacctgggtcctgccgacctacaacaaccacctgtacctgcggctcggctcgagcaacgccagcgacaccttcaacggattctccaccccctggggatactttgactttaaccgcttccactgccacttctcgccaagagactggcaaaggctcatcaacaaccactggggactgcgccccaaaagcatgcaagtccgcatcttcaacatccaagttaaggaggtcacgacgtctaacggggagacgaccgtatccaacaacctcaccagcacggtccagatctttgcggacagcacgtacgagctcccgtacgtgatggatgcaggtcaggagggcagcttgcctcctttccccaacgacgtgttcatggtgcctcagtacgggtactgcggactggtaaccggaggcagctctcaaaaccagacagacagaaatgccttctactgtctggagtactttcccagccagatgctgagaaccggaaacaactttgagatggtgtacaagtttgaaaacgtgcccttccactccatgtacgctcacagccagagcctggataggctgatgaacccgctgctggaccagtacctgtgggagctccagtctaccacctctggaggaactctcaaccagggcaattcagccaccaactttgccaagctgaccaaaacaaacttttctggctaccgcaaaaactggctcccggggcccatgatgaagcagcagagattctccaagactgccagtcaaaactacaagattccccagggaagaaacaacagtctgctccattatgagaccagaactaccctcgacggaagatggagcaattttgccccgggaacggccatggcaaccgcagccaacgacgccaccgacttctctcaggcccagctcatctttgcggggcccaacatcaccggcaacaccaccacagatgccaataacctgatgttcacttcagaagatgaacttagggccaccaacccccgggacactgacctgtttggccacctggcaaccaaccagcaaaacgccaccaccgttcctaccgtagacgacgtggacggagtcggcgtgtacccgggaatggtgtggcaggacagagacatttactaccaagggcccatttgggccaaaattccacacacggatggacactttcacccgtctcctctcattggcggatttggactgaaaagcccgcctccacaaatattcatcaaaaacactcctgtacccgccaatcccgcaacgaccttctctccggccagaatcaacagcttcatcacccagtacagcaccggacaggtggctgtcaaaatagaatgggaaatccagaaggagcggtccaagagatggaacccagaggtccagttcacgtccaactacggagcacaggactcgcttctctgggctcccgacaacgccggagcctacaaagagcccagggccattggatcccgatacctcaccaaccacctctagcccaattctgttgcataccctcaataaaccgtgtattcgtttcagtaaaatactgcctcttgtggtcattcggcgtacaacagcttacaacaacaacaaaacccccttgctagagagtgtggcactcccccccctgtcgcgttcgctcgttcgctggctcgattgggggggtggcagctcaaagagctgccagacgacggccctctgggccgtcgcccccccaatcgagccagcgaacgagcgaacgcgacaggggggggagtgccac

SEQ ID NO: 541 - protein, 390 aa, Bovine adeno-associated virus
MALVSWLVEHGITSEKQWIQENQESYLSFNSTGNSRSQIKAALDNASKIMSLTKSASDYLVGQTVPEDISENRIWQIFDLNGYDPAYAGSVLYGWCTRAFGKRNTVWLYGPATTGKTNIAEAISHTVPFYGCVNWTNENFPFNDCVEKMLIWWEEGKMTSKVVEPAKAILGGSRVRVDQKCKSSVQVDSTPVIITSNTNMCVVVDGNSTTFEHQQPLEDRMFRFELMRRLPPDFGKITKQEVKDFFAWAKVNQVPVTHEFMVPKKVAGTERAETSRKRPLDDVTNTNYKSPEKRARLSVVPETPRSSDVPVEPAPLRPLNWSSRYECRCDYHAKFDSVTGECDECEYLNRGKNGCIFHNATHCQICHAVPPWEKENVSDFNDFDDCNKEQ

SEQ ID NO: 542 - protein, 610 aa, Bovine adeno-associated virus
MATFYEVIVRVPFDVEEHLPGISDNFVDWVTGQIWELPPESDLNLTLIEQPQLTVADRIRRVFLYEWNKFSKQESKFFVQFEKGSEYFHLHTLVETSGISSMVLGRYVSQIRAQLVKVVFQNIEPRINDWVAITKVKKGGANKVVDSGYIPAYLLPKVQPELQWAWTNLEEYKLAALNLEERKRLVAQFQLESSQRSQEASSQRDVSADPVIKSKTSQKYMALVSWLVEHGITSEKQWIQENQESYLSFNSTGNSRSQIKAALDNASKIMSLTKSASDYLVGQTVPEDISENRIWQIFDLNGYDPAYAGSVLYGWCTRAFGKRNTVWLYGPATTGKTNIAEAISHTVPFYGCVNWTNENFPFNDCVEKMLIWWEEGKMTSKVVEPAKAILGGSRVRVDQKCKSSVQVDSTPVIITSNTNMCVVVDGNSTTFEHQQPLEDRMFRFELMRRLPPDFGKITKQEVKDFFAWAKVNQVPVTHEFMVPKKVAGTERAETSRKRPLDDVTNTNYKSPEKRARLSVVPETPRSSDVPVEPAPLRPLNWSSRYECRCDYHAKFDSVTGECDECEYLNRGKNGCIFHNATHCQICHAVPPWEKENVSDFNDFDDCNKEQ

SEQ ID NO: 543 - protein, 538 aa, Artificial Sequence
  Description of Artificial Sequence: Synthetic polypeptide
MRAAAGGNGGDAGQGAEGVGNASGDWHCDSTWSESHVTTTSTRTWVLPTYNNHLYLRLGSSNASDTFNGFSTPWGYFDFNRFHCHFSPRDWQRLINNHWGLRPKSMQVRIFNIQVKEVTTSNGETTVSNNLTSTVQIFADSTYELPYVMDAGQEGSLPPFPNDVFMVPQYGYCGLVTGGSSQNQTDRNAFYCLEYFPSQMLRTGNNFEMVYKFENVPFHSMYAHSQSLDRLMNPLLDQYLWELQSTTSGGTLNQGNSATNFAKLTKTNFSGYRKNWLPGPMMKQQRFSKTASQNYKIPQGRNNSLLHYETRTTLDGRWSNFAPGTAMATAANDATDFSQAQLIFAGPNITGNTTTDANNLMFTSEDELRATNPRDTDLFGHLATNQQNATTVPTVDDVDGVGVYPGMVWQDRDIYYQGPIWAKIPHTDGHFHPSPLIGGFGLKSPPPQIFIKNTPVPANPATTFSPARINSFITQYSTGQVAVKIEWEIQKERSKRWNPEVQFTSNYGAQDSLLWAPDNAGAYKEPRAIGSRYLTNHL

SEQ ID NO: 544 - protein, 736 aa, Artificial Sequence
  Description of Artificial Sequence: Synthetic polypeptide
MSFVDHPPDWLESIGDGFREFLGLEAGPPKPKANQQKQDNARGLVLPGYKYLGPGNGLDKGDPVNFADEVAREHDLSYQKQLEAGDNPYLKYNHADAEFQEKLASDTSFGGNLGKAVFQAKKRILEPLGLVETPDKTAPAAKKRPLEQSPQEPDSSSGVGKKGKQPARKRLNFDDEPGAGDGPPPEGPSSGAMSTETEMRAAAGGNGGDAGQGAEGVGNASGDWHCDSTWSESHVTTTSTRTWVLPTYNNHLYLRLGSSNASDTFNGFSTPWGYFDFNRFHCHFSPRDWQRLINNHWGLRPKSMQVRIFNIQVKEVTTSNGETTVSNNLTSTVHIFADSTYELPYVMDAGQEGSLPPFPNDVFMVPQYGYCGLVTGGSSQNQTDRNAFYCLEYFPSQMLRTGNNFEMVYKFENVPFHSMYAHSQSLDRLMNPLLDQYLWELQSTTSGGTLNQGNSATNFAKLTNKNFSGYRKNWLPGPMMKQQRFSKTASQNYKIPQGGNNSLLHYETRTTLDRRWSNFAPGTAMATAANDATDFSQAQLIFAGPNITGNTTTDANNLMFTSEDELRATNPRDTDLFGHLATNQQNATTVPTVDDVDGVGVYPGMVWQDRDIYYQGPIWAKIPHTDGHFHPSPLIGGFGLKSPPPQIFIKNTPVPANPATTFSPARINSFITQYSTGQVAVKIEWEIQKERSKRWNPEVQFTSNYGAQDSLLWAPDNAGAYKEPRAIGSRYLTNHL

SEQ ID NO: 545 - protein, 736 aa, Artificial Sequence
  Description of Artificial Sequence: Synthetic polypeptide
MSFVDHPPDWLESIGDGFREFLGLEAGPPKPKANQQKQDNARGLVLPGYKYLGPGNGLDKGDPVNFADEVAREHDLSYQKQLEAGDNPYLKYNHADAEFQEKLASDTSFGGNLGKAVFQAKKRILEPLGLVETPDKTAPAAKKRPLEQSPQEPDSSSGVGKKGKQPARKRLNFDDEPGAGDGPPPEGPSSGAMSTETEMRAAAGGNGGDAGQGAEGVGNASGDWHCDSTWSESHVTTTSTRTWVLPTYNNHLYLRLGSSNASDTFNGFSTPWGYFDFNRFHCHFSPRDWQRLINNHWGLRPKSMQVRIFNIQVKEVTTSNGETTVSNNLTSTVQIFADSTYELPYVMDAGQEGSLPPFPNDVFMVPQYGYCGLVTGGSSQNQTDRNAFYCLEYFPSQMLRTGNNFEMVYKFENVPFHSMYAHSQSLDRLMNPLLDQYLWELQSTTSGGTLNQGNSATNFAKLTKTNFSGYRKNWLPGPMMKQQRFSKTASQNYKIPQGRNNSLLHYETRTTLDGRWSNFAPGTAMATAANDATDFSQAQLIFAGPNITGNTTTDANNLMFTSEDELRATNPRDTDLFGHLATNQQNATTVPTVDDVDGVGVYPGMVWQDRDIYYQGPIWAKIPHTDGHFHPSPLIGGFGLKSPPPQIFIKNTPVPANPATTFSPARINSFITQYSTGQVAVKIEWEIQKERSKRWNPEVQFTSNYGAQDSLLWAPDNAGAYKEPRAIGSRYLTNHL

SEQ ID NO: 546 - protein, 736 aa, Bovine adeno-associated virus; identical to SEQ ID NO: 545

SEQ ID NO: 547 - protein, 600 aa, Bovine adeno-associated virus
TAPAAKKRPLEQSPQEPDSSSGVGKKGKQPARKRLNFDDEPGAGDGPPPEGPSSGAMSTETEMRAAAGGNGGDAGQGAEGVGNASGDWHCDSTWSESHVTTTSTRTWVLPTYNNHLYLRLGSSNASDTFNGFSTPWGYFDFNRFHCHFSPRDWQRLINNHWGLRPKSMQVRIFNIQVKEVTTSNGETTVSNNLTSTVQIFADSTYELPYVMDAGQEGSLPPFPNDVFMVPQYGYCGLVTGGSSQNQTDRNAFYCLEYFPSQMLRTGNNFEMVYKFENVPFHSMYAHSQSLDRLMNPLLDQYLWELQSTTSGGTLNQGNSATNFAKLTKTNFSGYRKNWLPGPMMKQQRFSKTASQNYKIPQGRNNSLLHYETRTTLDGRWSNFAPGTAMATAANDATDFSQAQLIFAGPNITGNTTTDANNLMFTSEDELRATNPRDTDLFGHLATNQQNATTVPTVDDVDGVGVYPGMVWQDRDIYYQGPIWAKIPHTDGHFHPSPLIGGFGLKSPPPQIFIKNTPVPANPATTFSPARINSFITQYSTGQVAVKIEWEIQKERSKRWNPEVQFTSNYGAQDSLLWAPDNAGAYKEPRAIGSRYLTNHL

SEQ ID NO: 548 - DNA, 2214 bp, Artificial Sequence
  Description of Artificial Sequence: Synthetic polynucleotide
atggctgccgatggttatcttccagattggctcgaggacactctctctgaaggaataagacagtggtggaagctcaaacctggcccaccaccaccaaagcccgcagagcggcataaggacgacagcaggggtcttgtgcttcctgggtacaagtacctcggacccttcaacggactcgacaagggagagccggtcaacgaggcagacgccgcggccctcgagcacgacaaagcctacgaccggcagctcgacagcggagacaacccgtacctcaagtacaaccacgccgacgcggagtttcaggagcgccttaaagaagatacgtcttttgggggcaacctcgggcgagcagtcttccaggccaaaaagaggcttcttgaacctcttggtctggttgaggaagcggctaagacggctcctggaaagaagaggcctgtagagcagtctcctcaggaaccggactcctcctcgggcatcggcaagacaggccagcagcccgctaaaaagagactcaatttcggtcagactggcgacacagagtcagtcccagaccctcaaccaatcggagaacctcccgcagccccctcaggtgtgggatctcttacaatggcttcaggtggtggcgcaccagtggcagacaataacgaaggtgccgatggagtgggtagttcctcgggaaattggcattgcgattcccaatggctgggggacagagtcatcaccaccagcacccgaacctgggccctgcccacctacaacaatcacctctacaagcaaatctccaacgggacatcgggaggagccaccaacgacaacacctacttcggctacagcaccccctgggggtattttgactttaacagattccactgccacttttcaccacgtgactggcagcgactcatcaacaacaactggggattccggcccaagagactcagcttcaagctcttcaacatccaggtcaaggaggtcacgcagaatgaaggcaccaagaccatcgccaataaccttaccagcacggtccaggtcttcacggactcggagtaccagctgccgtacgttctcggctctgcccaccagggctgcctgcctccgttcccggcggacgtgttcatgattccccagtacggctacctaacactcaacaacggtagtcaggccgtgggacgctcctccttctactgcctggaatactttccttcgcagatgctgagaaccggcaacaacttccagtttacttacaccttcgaggacgtgcctttccacagcagctacgcccacagccagagcttggaccggctgatgaatcctctgattgaccagtacctgtactacttgtctcggactcaaacaacaggaggcacggcaaatacgcagactctgggcttcagccaaggtgggcctaatacaatggccaatcaggcaaagaactggctgccaggaccctgttaccgccaacaacgcgtctcaacgacaaccgggcaaaacaacaatagcaactttgcctggactgctgggaccaaataccatctgaatggaagaaattcattggctaatcctggcatcgctatggcaacacacaaagacgacaaggagcgtttttttcccagtaacgggatcctgatttttggcaaacaaaatgctgccagagacaatgcggattacagcgatgtcatgctcaccagcgaggaagaaatcaaaaccactaaccctgtggctacagaggaatacggtatcgtggcagataacttgcagcagcaaaacacggctcctcaaattggaactgtcaacagccagggggccttacccggtatggtttggcagaaccgggacgtgtacctgcagggtcccatctgggccaagattcctcacacggacggcaacttccacccgtctccgctgatgggcggctttggcctgaaacatcctccgcctcagatcctgatcaagaacacgcctgtacctgcggatcctccgaccaccttcaaccagtcaaagctgaactctttcatcacgcaatacagcaccggacaggtcagcgtggaaattgaatgggagctgcagaaggaaaacagcaagcgctggaaccccgagatccagtacacctccaactactacaaatctacaagtgtggactttgctgttaatacagaaggcgtgtactctgaaccccaccccattggcacccgttacctcacccgtcccctgtaa

SEQ ID NO: 549 - protein, 737 aa, Artificial Sequence
  Description of Artificial Sequence: Synthetic polypeptide
MAADGYLPDWLEDTLSEGIRQWWKLKPGPPPPKPAERHKDDSRGLVLPGYKYLGPFNGLDKGEPVNEADAAALEHDKAYDRQLDSGDNPYLKYNHADAEFQERLKEDTSFGGNLGRAVFQAKKRLLEPLGLVEEAAKTAPGKKRPVEQSPQEPDSSSGIGKTGQQPAKKRLNFGQTGDTESVPDPQPIGEPPAAPSGVGSLTMASGGGAPVADNNEGADGVGSSSGNWHCDSQWLGDRVITTSTRTWALPTYNNHLYKQISNGTSGGATNDNTYFGYSTPWGYFDFNRFHCHFSPRDWQRLINNNWGFRPKRLSFKLFNIQVKEVTQNEGTKTIANNLTSTVQVFTDSEYQLPYVLGSAHQGCLPPFPADVFMIPQYGYLTLNNGSQAVGRSSFYCLEYFPSQMLRTGNNFQFTYTFEDVPFHSSYAHSQSLDRLMNPLIDQYLYYLSRTQTTGGTANTQTLGFSQGGPNTMANQAKNWLPGPCYRQQRVSTTTGQNNNSNFAWTAGTKYHLNGRNSLANPGIAMATHKDDKERFFPSNGILIFGKQNAARDNADYSDVMLTSEEEIKTTNPVATEEYGIVADNLQQQNTAPQIGTVNSQGALPGMVWQNRDVYLQGPIWAKIPHTDGNFHPSPLMGGFGLKHPPPQILIKNTPVPADPPTTFNQSKLNSFITQYSTGQVSVEIEWELQKENSKRWNPEIQYTSNYYKSTSVDFAVNTEGVYSEPHPIGTRYLTRPL

SEQ ID NO: 550 - protein, 736 aa, Artificial Sequence
  Description of Artificial Sequence: Synthetic polypeptide
MAADGYLPDWLEDNLSEGIREWWDLKPGAPKPKANQQKQDDGRGLVLPGYKYLGPFNGLDKGEPVNAADAAALEHDKAYDQQLKAGDNPYLRYNHADAEFQERLQEDTSFGGNLGRAVFQAKKRVLEPLGLVEEGAKTAPGKKRPVEQSPQEPDSSSGIGKTGQQPAKKRLNFGQTGDTESVPDPQPIGEPPAAPSGVGSLTMASGGGAPVADNNEGADGVGSSSGNWHCDSQWLGDRVITTSTRTWALPTYNNHLYKQISSASTGASNDNHYFGYSTPWGYFDFNRFHCHFSPRDWQRLINNNWGFRPKRLNFKLFNIQVKEVTDNNGVKTIANNLTSTVQVFTDSDYQLPYVLGSAHQGCLPPFPADVFMIPQYGYLTLNNGSQAVGRSSFYCLEYFPSQMLRTGNNFQFTYTFEDVPFHSSYAHSQSLDRLMNPLIDQYLYYLSRTQTTGGTANTQTLGFSQGGPNTMANQAKNWLPGPCYRQQRVSTTTGQNNNSNFAWTAGTKYHLNGRNSLANPGIAMATHKDDKERFFPSNGILIFGKQNAARDNADYSDVMLTSEEEIKTTNPVATEEYGIVADNLQQQNTAPQIGTVNSQGALPGMVWQNRDVYLQGPIWAKIPHTDGNFHPSPLMGGFGLKHPPPQILIKNTPVPADPPTTFNQSKLNSFITQYSTGQVSVEIEWELQKENSKRWNPEIQYTSNYYKSTSVDFAVNTEGVYSEPHPIGTRYLTRPL

SEQ ID NO: 551 - protein, 736 aa, Artificial Sequence
  Description of Artificial Sequence: Synthetic polypeptide
MAADGYLPDWLEDTLSEGIRQWWKLKPGPPPPKPAERHKDDSRGLVLPGYKYLGPFNGLDKGEPVNEADAAALEHDKAYDRQLDSGDNPYLKYNHADAEFQERLQGDTSFGGNLGRAVFQAKKRVLEPLGLVEEGAKTAPGKKRPVEQSPQEPDSSSGIGETGQQPAKKRLNFGQTGDSESVPDPQPLGEPPATPAAVGPTTMASGGGAPMADNNEGADGVGSSSGNWHCDSQWLGDRVITTSTRTWALPTYNNHLYKQISSASTGASNDNHYFGYSTPWGYFDFNRFHCHFSPRDWQRLINNNWGFRPKRLSFKLFNIQVKEVTDNNGVKTIANNLTSTVQVFTDSEYQLPYVLGSAHQGCLPPFPADVFMIPQYGYLTLNNGSQAVGRSSFYCLEYFPSQMLRTGNNFTFSYTFEDVPFHSSYAHSQSLDRLMNPLIDQYLYYLSRTQTTGGTANTQTLGFSQGGPNTMANQAKNWLPGPCYRQQRVSTTTGQNNNSNFAWTAGTKYHLNGRNSLANPGIAMATHKDDKERFFPSNGILIFGKQNAARDNADYSDVMLTSEEEIKTTNPVATEEYGIVADNLQQQNTAPQIGTVNSQGALPGMVWQNRDVYLQGPIWAKIPHTDGNFHPSPLMGGFGLKHPPPQILIKNTPVPADPPTTFNQSKLNSFITQYSTGQVSVEIEWELQKENSKRWNPEIQYTSNYYKSTSVDFAVNTEGVYSEPHPIGTRYLTRPL

SEQ ID NO: 552 - DNA, 2181 bp, Artificial Sequence
  Description of Artificial Sequence: Synthetic polynucleotide
atgtcttttgttgatcaccctccagattggttggaagaagttggtgaaggtcttcgcgagtttttgggccttgaagcgggcccaccgaaaccaaaacccaatcagcagcatcaagatcaagcccgtggtcttgtgctgcctggttataactatctcggacccggaaacggtctcgatcgaggagagcctgtcaacagggcagacgaggtcgcgcgagagcacgacatctcgtacaacgagcagcttgaggcgggagacaacccctacctcaagtacaaccacgcggacgccgagtttcaggagaagctcgccgacgacacatccttcgggggaaacctcggaaaggcagtctttcaggccaagaaaagggttctcgaaccttttggcctggttgaagagggtgctaagacggcccctaccggaaagcggatagacgaccactttccaaaaagaaagaaggctcggaccgaagaggactccaagccttccacctcgtcagacgccgaagctggacccagcggatcccagcagctgcaaatcccagcacaaccagcctcaagtttgggagctgatacaatgtctgcgggaggtggcggcccattgggcgacaataaccaaggtgccgatggagtgggcaatgcctcgggagattggcattgcgattccacgtggatgggggacagagtcgtcaccaagtccacccgcacctgggtgctgcccagctacaacaaccaccagtaccgagagatcaaaagcggctccgtcgacggaagcaacgccaacgcctactttggatacagcaccccctgggggtactttgactttaaccgcttccacagccactggagcccccgagactggcaaagactcatcaacaactattggggcttcagaccccggtctctcagagtcaaaatcttcaacatccaagtcaaagaggtcacggtgcaggactccaccaccaccatcgccaacaacctcacctccaccgtccaagtgtttacggacgacgactaccaactcccgtacgtcgtcggcaacgggaccgagggatgcctgccggccttccccccgcaggtctttacgctgccgcagtacggctacgcgacgctgaaccgagacaacggagacaacccgacagagcggagcagcttcttttgcctagagtactttcccagcaagatgctgaggacgggcaacaactttgagtttacctacagctttgaagaggtgcccttccactgcagcttcgccccgagccagaacctctttaagctggccaacccgctggtggaccagtacctgtaccgcttcgtgagcacctcggccacgggcgccatccagttccaaaagaacctggcgggcagatacgccaacacctacaaaaactggttcccggggcccatgggccgaacccagggctggaacacgagctctggggtcagcagcaccaacagagtcagcgtcaacaacttttccgtctcaaaccggatgaacctggagggggccagctaccaagtgaacccccagcccaacgggatgacaaacacgctccaaggcagcaaccgctacgcgctggaaaacaccatgatcttcaacgctcaaaacgccacgccgggaactacctcggtgtacccagaggacaatctactgctgaccagcgagagcgagactcagcccgtcaaccgggtggcttacaacacgggcggtcagatggccaccaacgcccagaacgccaccacggctcccacggtcgggacctacaacctccaggaagtgcttcctggcagcgtatggatggagagggacgtgtacctccaaggacccatctgggccaagatcccagagacgggggcgcactttcacccctctccggccatgggcggattcggactcaaacacccgccgcccatgatgctcatcaaaaacacgccggtgcccggcaacatcaccagcttctcggacgtgcccgtcagcagcttcatcacccagtacagcaccgggcaggtcaccgtggagatggaatgggagctcaaaaaggaaaactccaagaggtggaacccagagatccagtacaccaacaactacaacgacccccagtttgtggactttgctccagacggctccggcgaatacagaaccaccagagccatcggaacccgatacctcacccgacccctt

SEQ ID NO: 553 - protein, 726 aa, Artificial Sequence
  Description of Artificial Sequence: Synthetic polypeptide
MSFVDHPPDWLEEVGEGLREFLGLEAGPPKPKPNQQHQDQARGLVLPGYNYLGPGNGLDRGEPVNRADEVAREHDISYNEQLEAGDNPYLKYNHADAEFQEKLADDTSFGGNLGKAVFQAKKRVLEPFGLVEEGAKTAPTGKRIDDHFPKRKKARTEEDSKPSTSSDAEAGPSGSQQLQIPAQPASSLGADTMSAGGGGPLGDNNQGADGVGNASGDWHCDSTWMGDRVVTKSTRTWVLPSYNNHQYREIKSGSVDGSNANAYFGYSTPWGYFDFNRFHSHWSPRDWQRLINNYWGFRPRSLRVKIFNIQVKEVTVQDSTTTIANNLTSTVQVFTDDDYQLPYVVGNGTEGCLPAFPPQVFTLPQYGYATLNRDNGDNPTERSSFFCLEYFPSKMLRTGNNFEFTYSFEEVPFHCSFAPSQNLFKLANPLVDQYLYRFVSTSATGAIQFQKNLAGRYANTYKNWFPGPMGRTQGWNTSSGSSTNRVSVNNFSVSNRMNLEGASYQVNPQPNGMTNTLQGSNRYALENTMIFNAQNATPGTTSVYPEDNLLLTSESETQPVNRVAYNTGGQMATNAQNATTAPTVGTYNLQEVLPGSVWMERDVYLQGPIWAKIPETGAHFHPSPAMGGFGLKHPPPMMLIKNTPVPGNITSFSDVPVSSFITQYSTGQVTVEMEWELKKENSKRWNPEIQYTNNYNDPQFVDFAPDGSGEYRTTRAIGTRYLTRPL

SEQ ID NO: 554 - protein, 735 aa, Artificial Sequence
  Description of Artificial Sequence: Synthetic polypeptide
MAADGYLPDWLEDTLSEGIRQWWKLKPGPPPPKPAERHKDDSRGLVLPGYKYLGPFNGLDKGEPVNEADAAALEHDKAYDRQLDSGDNPYLKYNHADAEFQERLKEDTSFGGNLGRAVFQAKKRILEPLGLVEEPVKTAPGKKRPVEHSPAEPDSSSGTGKSGQQPARKRLNFGQTGDADSVPDPQPLGQPPAAPSGLGTNTMASGSGAPMADNNEGADGVGNSSGNWHCDSTWMGDRVITTSTRTWALPTYNNHLYKQISSQSGASNDNHYFGYSTPWGYFDFNRFHCHFSPRDWQRLINNNWGFRPKRLSFKLFNIQVKEVTQNDGTTTIANNLTSTVQVFTDSEYQLPYVLGSAHQGCLPPFPADVFMVPQYGYLTLNNGSQAVGRSSFYCLEYFPSQMLRTGNNFTFSYTFEDVPFHSSYAHSQSLDRLMNPLIDQYLYYLSRTNTPSGTTTMSRLQFSQAGASDIRDQSRNWLPGPCYRQQRVSKTAADNNNSDYSWTGATKYHLNGRDSLVNPGPAMASHKDDEEKYFPQSGVLIFGKQDSGKTNVDIEKVMITDEEEIRTTNPVATEQYGSVSTNLQSGNTQAATSDVNTQGVLPGMVWQDRDVYLQGPIWAKIPHTDGHFHPSPLMGGFGLKHPPPQILIKNTPVPANPSTTFSAAKFASFITQYSTGQVSVEIEWELQKENSKRWNPEIQYTSNYNKSVNVDFTVDTNGVYSEPRPIGTRYLTRNL

SEQ ID NO: 555 - DNA, 1797 bp, Artificial Sequence
  Description of Artificial Sequence: Synthetic polynucleotide
acggctccgaccggagacaagcggaaaggcgaagacgaacctcgtttgcccgacacttcttcacagactcccaagaaaaacaagaagcctcgcaaggaaagaccttccggcggggcagaagatccgggcgaaggcacctcttccaacgctggagcagcagcacccgcctctagtgtgggatcatctatcatggctgaaggaggtggcggcccagtgggcgatgcaggccagggtgccgatggagtgggcaattcctccggaaattggcattgcgattcccaatggctggaaaacggagtcgtcactcgaaccacccgaacctgggtcttgcccagctacaacaaccacctgtacaaacgaatccaaggacccagcggaggcgacaacaacaacaaattctttggattcagcaccccctggggatactttgactacaatcgattccactgccacttttccccgcgagactggcaacgactcatcaacaacaactggggcatccgtcccaaagcgatgcgctttagactctttaacatccaggttaaagaggtcacggtccaagacttcaacaccaccatcggcaacaacctcaccagtacggtccaggtctttgcggacaaggactaccaactgccgtacgtcctcggatcggctaccgaaggcaccttcccgccgttcccagcggatatctacacgatcccgcagtacgggtactgcacgctaaactacaacaacgaggcggtggatcgttcggccttctactgtctggactactttccctcagacatgctgcggacaggaaataactttgagtttacttacaccttcgaggacgttcctttccatagcatgtttgcccacaaccagacgctagaccggctgatgaatcccctcgtggatcagtacctctgggctttcagctccgtcagccaagcaggctcatctggacgagctcttcattactcgcgggcgactaaaaccaacatggcggctcaatataggaactggttacctgggcctttcttccgtgatcagcaaatctttacgggcgctagcaacatcactaaaaataacgtctttagcgtttgggaaaaaggcaagcaatgggaactcgacaatcggaccaacctaatgcagcccggtcctgcggcagcgaccacctttagcggagaacctgaccgtcaagccatgcaaaacacgctggcttttagcaggaccgtctacgatcaaacgaccgccacgaccgatcgtaaccagatactcatcaccaacgaagacgaaatcagacccaccaactcggtcggtatcgacgcgtggggagcagttcccaccaacaaccagtcgatcgtgacccccggcactcgcgcggccgtcaacaatcaaggggcgcttcccgggatggtgtggcaaaacagagacatttaccctacagggacccatttggccaaaattcccgacactgacaatcacttccatccgtccccgcttattgggcggtttggctgcaagcatccccctccccagattttcattaaaaacacacccgtccctgccaacccttcggaaacgttccagacggccaaagtggcctccttcatcaaccagtactcgaccggacagtgcaccgtcgaaatcttttgggaactcaagaaggaaacctccaagcgctggaaccccgaaatccagttcacctccaactttggcaacgcggccgacatccagtttgccgtctccgacacgggatcctattccgaacctcgtcccatcggtacccgttaccttaccaaacctctgtaa

SEQ ID NO: 556 - DNA, 1989 bp, Artificial Sequence
  Description of Artificial Sequence: Synthetic polynucleotide
atgaggtcgtactacgaggtcatcgttcagctgcccaacgacgtcgagagtcaggtacctggaatctccgattcgttcgtcaactggattacgtcgcgagaatggacgttgcctgaggacgccgattgggatttggaccaggtcgatcaagttcaactgacgctcggcgacaaaatccaacgggagattcgaactcattgggggacgatggccaaagaaccggactttcactattttatccaactggaacaaggtgaggtgttctttcatttacacgtcctgctggaaacgtgttccgtaaagccgatggtactcggaagatatatccgacatattcaacaaaaaattgtgagtaaagtctactgcgccacgagcctacgatggaaggatggatgcgtggtgaccaagaccaaaaatttcgggggcgcgaacaaggtccgggccgagtcgtatattcccgcctacctgatcccgaaacagcaaccggaagtgcagtgggcgtggactaacgtgcccgagtatataaaagcgtgcttgcaccgagaactgcgtgccagtctcgcgcgacttcacttcgaggaggcgggcgtctcgcaatccaaggaaaatctcgcgagaactgcagacggcgctcccgtgatgccgacccgcgtcagcaaacgctacatggagctcgtggattggctcgtggagaaggggatcaccaccgagaaggaatggctgctggaaaacagagaaagctttcggagctttcaggcctcgagcaactcggcgcgtcagatcaagacggccctgcaaggcgccattcaggagatgcttctgaccaagacggcggaggactacctcgtcggaaaggatcccgtctcggacgacgacatccgtcagaaccgcatctacaagattctggaactgaaccactacgacccagcgtacgtggggagtattttggtcgggtggtgccagaagaaatggggcaagcgaaacacgctgtggctgttcggacatgcgaccaccggcaagaccaacatcgcggaggctattgcccatgctgtgccgttctatggatgcgttaactggaccaacgagaactttccgttcaacgactgcgtcgaaaaaatgattatctggtgggaggagggcaaaatgaccgccaaagtggtggaaacagccaaggcgattctgggaggatctcgggtgagagtggaccaaaaatgcaaagcttcggttccgatcgaaccgacgccggtcattattaccagtaacaccaacatgtgttatgtcatcgacgggaacacgaccacgttcgagcataagcagccgttggaggacaggatgtttaagctcgaattgctgactcggttgcctgatgactttggtaaggtgaccaaacaggaggtgcgtcaattcttcaggtggtctcaggatcacctgacccctgtgatcccagaattcctagtgcggaaggcggagtctcgcaaaagacccgccccttccggggaaggctatataagcccgacaaagcggcccgcgctcgcagagcagcagcaggcgtcggagagcgcggacccggttcccaccaggtatcgtatcaaatgctcgaaacattgcggtatggataaaatgttgtttccttgccaaatttgtgaatcgatgaacagagatattaatatttgtgctattcataaaacgaccgactgtaaagagtgtttccccgactacggggataaagatgatgtagaactacccccctgtacagaacacaacgtgtctcgttgttatcaatgtcattcgggcgaattgtatcgcgtgacttcggactctgacgagaaacctgcccccgagagtgatgaaggcaccgagccatcctatgctccctgcacgattcaccacctgatgggcaagagtcacgggttagtcacttgcgcggcgtgtcggttgaaaaatagtacgttgcatgatgacttggatgacggtgatctcgaacaataa

SEQ ID NO: 557 - DNA, 1626 bp, Artificial Sequence
  Description of Artificial Sequence: Synthetic polynucleotide
atgaggtcgtactacgaggtcatcgttcagctgcccaacgacgtcgagagtcaggtacctggaatctccgattcgttcgtcaactggattacgtcgcgagaatggacgttgcctgaggacgccgattgggatttggaccaggtcgatcaagttcaactgacgctcggcgacaaaatccaacgggagattcgaactcattgggggacgatggccaaagaaccggactttcactattttatccaactggaacaaggtgaggtgttctttcatttacacgtcctgctggaaacgtgttccgtaaagccgatggtactcggaagatatatccgacatattcaacaaaaaattgtgagtaaagtctactgcgccacgagcctacgatggaaggatggatgcgtggtgaccaagaccaaaaatttcgggggcgcgaacaaggtccgggccgagtcgtatattcccgcctacctgatcccgaaacagcaaccggaagtgcagtgggcgtggactaacgtgcccgagtatataaaagcgtgcttgcaccgagaactgcgtgccagtctcgcgcgacttcacttcgaggaggcgggcgtctcgcaatccaaggaaaatctcgcgagaactgcagacggcgctcccgtgatgccgacccgcgtcagcaaacgctacatggagctcgtggattggctcgtggagaaggggatcaccaccgagaaggaatggctgctggaaaacagagaaagctttcggagctttcaggcctcgagcaactcggcgcgtcagatcaagacggccctgcaaggcgccattcaggagatgcttctgaccaagacggcggaggactacctcgtcggaaaggatcccgtctcggacgacgacatccgtcagaaccgcatctacaagattctggaactgaaccactacgacccagcgtacgtggggagtattttggtcgggtggtgccagaagaaatggggcaagcgaaacacgctgtggctgttcggacatgcgaccaccggcaagaccaacatcgcggaggctattgcccatgctgtgccgttctatggatgcgttaactggaccaacgagaactttccgttcaacgactgcgtcgaaaaaatgattatctggtgggaggagggcaaaatgaccgccaaagtggtggaaacagccaaggcgattctgggaggatctcgggtgagagtggaccaaaaatgcaaagcttcggttccgatcgaaccgacgccggtcattattaccagtaacaccaacatgtgttatgtcatcgacgggaacacgaccacgttcgagcataagcagccgttggaggacaggatgtttaagctcgaattgctgactcggttgcctgatgactttggtaaggtgaccaaacaggaggtgcgtcaattcttcaggtggtctcaggatcacctgacccctgtgatcccagaattcctagtgcggaaggcggagtctcgcaaaagacccgccccttccggggaaggctatataagcccgacaaagcggcccgcgctcgcagagcagcagcaggcgtcggagagcgcggacccggttcccaccagattggttggagcggttggtcaaaaagggagtgaatgctgcagctga

SEQ ID NO: 558 - DNA, 1323 bp, Artificial Sequence
  Description of Artificial Sequence: Synthetic polynucleotide
atggagctcgtggattggctcgtggagaaggggatcaccaccgagaaggaatggctgctggaaaacagagaaagctttcggagctttcaggcctcgagcaactcggcgcgtcagatcaagacggccctgcaaggcgccattcaggagatgcttctgaccaagacggcggaggactacctcgtcggaaaggatcccgtctcggacgacgacatccgtcagaaccgcatctacaagattctggaactgaaccactacgacccagcgtacgtggggagtattttggtcgggtggtgccagaagaaatggggcaagcgaaacacgctgtggctgttcggacatgcgaccaccggcaagaccaacatcgcggaggctattgcccatgctgtgccgttctatggatgcgttaactggaccaacgagaactttccgttcaacgactgcgtcgaaaaaatgattatctggtgggaggagggcaaaatgaccgccaaagtggtggaaacagccaaggcgattctgggaggatctcgggtgagagtggaccaaaaatgcaaagcttcggttccgatcgaaccgacgccggtcattattaccagtaacaccaacatgtgttatgtcatcgacgggaacacgaccacgttcgagcataagcagccgttggaggacaggatgtttaagctcgaattgctgactcggttgcctgatgactttggtaaggtgaccaaacaggaggtgcgtcaattcttcaggtggtctcaggatcacctgacccctgtgatcccagaattcctagtgcggaaggcggagtctcgcaaaagacccgccccttccggggaaggctatataagcccgacaaagcggcccgcgctcgcagagcagcagcaggcgtcggagagcgcggacccggttcccaccaggtatcgtatcaaatgctcgaaacattgcggtatggataaaatgttgtttccttgccaaatttgtgaatcgatgaacagagatattaatatttgtgctattcataaaacgaccgactgtaaagagtgtttccccgactacggggataaagatgatgtagaactacccccctgtacagaacacaacgtgtctcgttgttatcaatgtcattcgggcgaattgtatcgcgtgacttcggactctgacgagaaacctgcccccgagagtgatgaaggcaccgagccatcctatgctccctgcacgattcaccacctgatgggcaagagtcacgggttagtcacttgcgcggcgtgtcggttgaaaaatagtacgttgcatgatgacttggatgacggtgatctcgaacaataa

SEQ ID NO: 559 - DNA, 960 bp, Artificial Sequence
  Description of Artificial Sequence: Synthetic polynucleotide
atggagctcgtggattggctcgtggagaaggggatcaccaccgagaaggaatggctgctggaaaacagagaaagctttcggagctttcaggcctcgagcaactcggcgcgtcagatcaagacggccctgcaaggcgccattcaggagatgcttctgaccaagacggcggaggactacctcgtcggaaaggatcccgtctcggacgacgacatccgtcagaaccgcatctacaagattctggaactgaaccactacgacccagcgtacgtggggagtattttggtcgggtggtgccagaagaaatggggcaagcgaaacacgctgtggctgttcggacatgcgaccaccggcaagaccaacatcgcggaggctattgcccatgctgtgccgttctatggatgcgttaactggaccaacgagaactttccgttcaacgactgcgtcgaaaaaatgattatctggtgggaggagggcaaaatgaccgccaaagtggtggaaacagccaaggcgattctgggaggatctcgggtgagagtggaccaaaaatgcaaagcttcggttccgatcgaaccgacgccggtcattattaccagtaacaccaacatgtgttatgtcatcgacgggaacacgaccacgttcgagcataagcagccgttggaggacaggatgtttaagctcgaattgctgactcggttgcctgatgactttggtaaggtgaccaaacaggaggtgcgtcaattcttcaggtggtctcaggatcacctgacccctgtgatcccagaattcctagtgcggaaggcggagtctcgcaaaagacccgccccttccggggaaggctatataagcccgacaaagcggcccgcgctcgcagagcagcagcaggcgtcggagagcgcggacccggttcccaccagattggttggagcggttggtcaaaaagggagtgaatgctgcagctga

SEQ ID NO: 560 - DNA, 1608 bp, Artificial Sequence
  Description of Artificial Sequence: Synthetic polynucleotide
atggctgaaggaggtggcggcccagtgggcgatgcaggccagggtgccgatggagtgggcaattcctccggaaattggcattgcgattcccaatggctggaaaacggagtcgtcactcgaaccacccgaacctgggtcttgcccagctacaacaaccacctgtacaaacgaatccaaggacccagcggaggcgacaacaacaacaaattctttggattcagcaccccctggggatactttgactacaatcgattccactgccacttttccccgcgagactggcaacgactcatcaacaacaactggggcatccgtcccaaagcgatgcgctttagactctttaacatccaggttaaagaggtcacggtccaagacttcaacaccaccatcggcaacaacctcaccagtacggtccaggtctttgcggacaaggactaccaactgccgtacgtcctcggatcggctaccgaaggcaccttcccgccgttcccagcggatatctacacgatcccgcagtacgggtactgcacgctaaactacaacaacgaggcggtggatcgttcggccttctactgtctggactactttccctcagacatgctgcggacaggaaataactttgagtttacttacaccttcgaggacgttcctttccatagcatgtttgcccacaaccagacgctagaccggctgatgaatcccctcgtggatcagtacctctgggctttcagctccgtcagccaagcaggctcatctggacgagctcttcattactcgcgggcgactaaaaccaacatggcggctcaatataggaactggttacctgggcctttcttccgtgatcagcaaatctttacgggcgctagcaacatcactaaaaataacgtctttagcgtttgggaaaaaggcaagcaatgggaactcgacaatcggaccaacctaatgcagcccggtcctgcggcagcgaccacctttagcggagaacctgaccgtcaagccatgcaaaacacgctggcttttagcaggaccgtctacgatcaaacgaccgccacgaccgatcgtaaccagatactcatcaccaacgaagacgaaatcagacccaccaactcggtcggtatcgacgcgtggggagcagttcccaccaacaaccagtcgatcgtgacccccggcactcgcgcggccgtcaacaatcaaggggcgcttcccgggatggtgtggcaaaacagagacatttaccctacagggacccatttggccaaaattcccgacactgacaatcacttccatccgtccccgcttattgggcggtttggctgcaagcatccccctccccagattttcattaaaaacacacccgtccctgccaacccttcggaaacgttccagacggccaaagtggcctccttcatcaaccagtactcgaccggacagtgcaccgtcgaaatcttttgggaactcaagaaggaaacctccaagcgctggaaccccgaaatccagttcacctccaactttggcaacgcggccgacatccagtttgccgtctccgacacgggatcctattccgaacctcgtcccatcggtacccgttaccttaccaaacctctgtaa

SEQ ID NO: 561 - DNA, 2232 bp, Artificial Sequence
  Description of Artificial Sequence: Synthetic polynucleotide
atgtctctcatttctgatgcgattccagattggttggagcggttggtcaaaaagggagtgaatgctgcagctgatttctaccatttggaaagcggtcctcctcgtcctaaggcaaatcagcaaactcaagaatctcttgaaaaggacgattcgagaggtctcgtgttcccaggctacaattatctaggccctttcaacggtctagataaaggagaacccgtcaacgaggcagacgctgccgccttagaacacgacaaggcttacgacctcgaaatcaaggacgggcacaacccgtactttgagtacaacgaggccgacagacgtttccaggaacgtctcaaagacgatacctcctttggaggcaatttaggtaaagccatcttccaggccaaaaagagggttctcgaaccctttggtctggtggaagactcaaagacggctccgaccggagacaagcggaaaggcgaagacgaacctcgtttgcccgacacttcttcacagactcccaagaaaaacaagaagcctcgcaaggaaagaccttccggcggggcagaagatccgggcgaaggcacctcttccaacgctggagcagcagcacccgcctctagtgtgggatcatctatcatggctgaaggaggtggcggcccagtgggcgatgcaggccagggtgccgatggagtgggcaattcctccggaaattggcattgcgattcccaatggctggaaaacggagtcgtcactcgaaccacccgaacctgggtcttgcccagctacaacaaccacctgtacaaacgaatccaaggacccagcggaggcgacaacaacaacaaattctttggattcagcaccccctggggatactttgactacaatcgattccactgccacttttccccgcgagactggcaacgactcatcaacaacaactggggcatccgtcccaaagcgatgcgctttagactctttaacatccaggttaaagaggtcacggtccaagacttcaacaccaccatcggcaacaacctcaccagtacggtccaggtctttgcggacaaggactaccaactgccgtacgtcctcggatcggctaccgaaggcaccttcccgccgttcccagcggatatctacacgatcccgcagtacgggtactgcacgctaaactacaacaacgaggcggtggatcgttcggccttctactgtctggactactttccctcagacatgctgcggacaggaaataactttgagtttacttacaccttcgaggacgttcctttccatagcatgtttgcccacaaccagacgctagaccggctgatgaatcccctcgtggatcagtacctctgggctttcagctccgtcagccaagcaggctcatctggacgagctcttcattactcgcgggcgactaaaaccaacatggcggctcaatataggaactggttacctgggcctttcttccgtgatcagcaaatctttacgggcgctagcaacatcactaaaaataacgtctttagcgtttgggaaaaaggcaagcaatgggaactcgacaatcggaccaacctaatgcagcccggtcctgcggcagcgaccacctttagcggagaacctgaccgtcaagccatgcaaaacacgctggcttttagcaggaccgtctacgatcaaacgaccgccacgaccgatcgtaaccagatactcatcaccaacgaagacgaaatcagacccaccaactcggtcggtatcgacgcgtggggagcagttcccaccaacaaccagtcgatcgtgacccccggcactcgcgcggccgtcaacaatcaaggggcgcttcccgggatggtgtggcaaaacagagacatttaccctacagggacccatttggccaaaattcccgacactgacaatcacttccatccgtccccgcttattgggcggtttggctgcaagcatccccctccccagattttcattaaaaacacacccgtccctgccaacccttcggaaacgttccagacggccaaagtggcctccttcatcaaccagtactcgaccggacagtgcaccgtcgaaatcttttgggaactcaagaaggaaacctccaagcgctggaaccccgaaatccagttcacctccaactttggcaacgcggccgacatccagtttgccgtctccgacacgggatcctattccgaacctcgtcccatcggtacccgttaccttaccaaacctctgtaa

SEQ ID NO: 562 - protein, 535 aa, Artificial Sequence
  Description of Artificial Sequence: Synthetic polypeptide
MAEGGGGPVGDAGQGADGVGNSSGNWHCDSQWLENGVVTRTTRTWVLPSYNNHLYKRIQGPSGGDNNNKFFGFSTPWGYFDYNRFHCHFSPRDWQRLINNNWGIRPKAMRFRLFNIQVKEVTVQDFNTTIGNNLTSTVQVFADKDYQLPYVLGSATEGTFPPFPADIYTIPQYGYCTLNYNNEAVDRSAFYCLDYFPSDMLRTGNNFEFTYTFEDVPFHSMFAHNQTLDRLMNPLVDQYLWAFSSVSQAGSSGRALHYSRATKTNMAAQYRNWLPGPFFRDQQIFTGASNITKNNVFSVWEKGKQWELDNRTNLMQPGPAAATTFSGEPDRQAMQNTLAFSRTVYDQTTATTDRNQILITNEDEIRPTNSVGIDAWGAVPTNNQSIVTPGTRAAVNNQGALPGMVWQNRDIYPTGTHLAKIPDTDNHFHPSPLIGRFGCKHPPPQIFIKNTPVPANPSETFQTAKVASFINQYSTGQCTVEIFWELKKETSKRWNPEIQFTSNFGNAADIQFAVSDTGSYSEPRPIGTRYLTKPL

SEQ ID NO: 563 - protein, 440 aa, Artificial Sequence
  Description of Artificial Sequence: Synthetic polypeptide
MELVDWLVEKGITTEKEWLLENRESFRSFQASSNSARQIKTALQGAIQEMLLTKTAEDYLVGKDPVSDDDIRQNRIYKILELNHYDPAYVGSILVGWCQKKWGKRNTLWLFGHATTGKTNIAEAIAHAVPFYGCVNWTNENFPFNDCVEKMIIWWEEGKMTAKVVETAKAILGGSRVRVDQKCKASVPIEPTPVIITSNTNMCYVIDGNTTTFEHKQPLEDRMFKLELLTRLPDDFGKVTKQEVRQFFRWSQDHLTPVIPEFLVRKAESRKRPAPSGEGYISPTKRPALAEQQQASESADPVPTRYRIKCSKHCGMDKMLFPCQICESMNRDINICAIHKTTDCKECFPDYGDKDDVELPPCTEHNVSRCYQCHSGELYRVTSDSDEKPAPESDEGTEPSYAPCTIHHLMGKSHGLVTCAACRLKNSTLHDDLDDGDLEQ

SEQ ID NO: 564 - protein, 319 aa, Artificial Sequence
  Description of Artificial Sequence: Synthetic polypeptide
MELVDWLVEKGITTEKEWLLENRESFRSFQASSNSARQIKTALQGAIQEMLLTKTAEDYLVGKDPVSDDDIRQNRIYKILELNHYDPAYVGSILVGWCQKKWGKRNTLWLFGHATTGKTNIAEAIAHAVPFYGCVNWTNENFPFNDCVEKMIIWWEEGKMTAKVVETAKAILGGSRVRVDQKCKASVPIEPTPVIITSNTNMCYVIDGNTTTFEHKQPLEDRMFKLELLTRLPDDFGKVTKQEVRQFFRWSQDHLTPVIPEFLVRKAESRKRPAPSGEGYISPTKRPALAEQQQASESADPVPTRLVGAVGQKGSECCS

SEQ ID NO: 565 - protein, 662 aa, Artificial Sequence
  Description of Artificial Sequence: Synthetic polypeptide
MRSYYEVIVQLPNDVESQVPGISDSFVNWITSREWTLPEDADWDLDQVDQVQLTLGDKIQREIRTHWGTMAKEPDFHYFIQLEQGEVFFHLHVLLETCSVKPMVLGRYIRHIQQKIVSKVYCATSLRWKDGCVVTKTKNFGGANKVRAESYIPAYLIPKQQPEVQWAWTNVPEYIKACLHRELRASLARLHFEEAGVSQSKENLARTADGAPVMPTRVSKRYMELVDWLVEKGITTEKEWLLENRESFRSFQASSNSARQIKTALQGAIQEMLLTKTAEDYLVGKDPVSDDDIRQNRIYKILELNHYDPAYVGSILVGWCQKKWGKRNTLWLFGHATTGKTNIAEAIAHAVPFYGCVNWTNENFPFNDCVEKMIIWWEEGKMTAKVVETAKAILGGSRVRVDQKCKASVPIEPTPVIITSNTNMCYVIDGNTTTFEHKQPLEDRMFKLELLTRLPDDFGKVTKQEVRQFFRWSQDHLTPVIPEFLVRKAESRKRPAPSGEGYISPTKRPALAEQQQASESADPVPTRYRIKCSKHCGMDKMLFPCQICESMNRDINICAIHKTTDCKECFPDYGDKDDVELPPCTEHNVSRCYQCHSGELYRVTSDSDEKPAPESDEGTEPSYAPCTIHHLMGKSHGLVTCAACRLKNSTLHDDLDDGDLEQ

SEQ ID NO: 566 - protein, 541 aa, Artificial Sequence
  Description of Artificial Sequence: Synthetic polypeptide
MRSYYEVIVQLPNDVESQVPGISDSFVNWITSREWTLPEDADWDLDQVDQVQLTLGDKIQREIRTHWGTMAKEPDFHYFIQLEQGEVFFHLHVLLETCSVKPMVLGRYIRHIQQKIVSKVYCATSLRWKDGCVVTKTKNFGGANKVRAESYIPAYLIPKQQPEVQWAWTNVPEYIKACLHRELRASLARLHFEEAGVSQSKENLARTADGAPVMPTRVSKRYMELVDWLVEKGITTEKEWLLENRESFRSFQASSNSARQIKTALQGAIQEMLLTKTAEDYLVGKDPVSDDDIRQNRIYKILELNHYDPAYVGSILVGWCQKKWGKRNTLWLFGHATTGKTNIAEAIAHAVPFYGCVNWTNENFPFNDCVEKMIIWWEEGKMTAKVVETAKAILGGSRVRVDQKCKASVPIEPTPVIITSNTNMCYVIDGNTTTFEHKQPLEDRMFKLELLTRLPDDFGKVTKQEVRQFFRWSQDHLTPVIPEFLVRKAESRKRPAPSGEGYISPTKRPALAEQQQASESADPVPTRLVGAVGQKGSECCS

SEQ ID NO: 567 - protein, 743 aa, Artificial Sequence
  Description of Artificial Sequence: Synthetic polypeptide
MSLISDAIPDWLERLVKKGVNAAADFYHLESGPPRPKANQQTQESLEKDDSRGLVFPGYNYLGPFNGLDKGEPVNEADAAALEHDKAYDLEIKDGHNPYFEYNEADRRFQERLKDDTSFGGNLGKAIFQAKKRVLEPFGLVEDSKTAPTGDKRKGEDEPRLPDTSSQTPKKNKKPRKERPSGGAEDPGEGTSSNAGAAAPASSVGSSIMAEGGGGPVGDAGQGADGVGNSSGNWHCDSQWLENGVVTRTTRTWVLPSYNNHLYKRIQGPSGGDNNNKFFGFSTPWGYFDYNRFHCHFSPRDWQRLINNNWGIRPKAMRFRLFNIQVKEVTVQDFNTTIGNNLTSTVQVFADKDYQLPYVLGSATEGTFPPFPADIYTIPQYGYCTLNYNNEAVDRSAFYCLDYFPSDMLRTGNNFEFTYTFEDVPFHSMFAHNQTLDRLMNPLVDQYLWAFSSVSQAGSSGRALHYSRATKTNMAAQYRNWLPGPFFRDQQIFTGASNITKNNVFSVWEKGKQWELDNRTNLMQPGPAAATTFSGEPDRQAMQNTLAFSRTVYDQTTATTDRNQILITNEDEIRPTNSVGIDAWGAVPTNNQSIVTPGTRAAVNNQGALPGMVWQNRDIYPTGTHLAKIPDTDNHFHPSPLIGRFGCKHPPPQIFIKNTPVPANPSETFQTAKVASFINQYSTGQCTVEIFWELKKETSKRWNPEIQFTSNFGNAADIQFAVSDTGSYSEPRPIGTRYLTKPL

SEQ ID NO: 568 - protein, 598 aa, Artificial Sequence
  Description of Artificial Sequence: Synthetic polypeptide
TAPTGDKRKGEDEPRLPDTSSQTPKKNKKPRKERPSGGAEDPGEGTSSNAGAAAPASSVGSSIMAEGGGGPVGDAGQGADGVGNSSGNWHCDSQWLENGVVTRTTRTWVLPSYNNHLYKRIQGPSGGDNNNKFFGFSTPWGYFDYNRFHCHFSPRDWQRLINNNWGIRPKAMRFRLFNIQVKEVTVQDFNTTIGNNLTSTVQVFADKDYQLPYVLGSATEGTFPPFPADIYTIPQYGYCTLNYNNEAVDRSAFYCLDYFPSDMLRTGNNFEFTYTFEDVPFHSMFAHNQTLDRLMNPLVDQYLWAFSSVSQAGSSGRALHYSRATKTNMAAQYRNWLPGPFFRDQQIFTGASNITKNNVFSVWEKGKQWELDNRTNLMQPGPAAATTFSGEPDRQAMQNTLAFSRTVYDQTTATTDRNQILITNEDEIRPTNSVGIDAWGAVPTNNQSIVTPGTRAAVNNQGALPGMVWQNRDIYPTGTHLAKIPDTDNHFHPSPLIGRFGCKHPPPQIFIKNTPVPANPSETFQTAKVASFINQYSTGQCTVEIFWELKKETSKRWNPEIQFTSNFGNAADIQFAVSDTGSYSEPRPIGTRYLTKPL

SEQ ID NO: 569 - DNA, 4694 bp, Artificial Sequence
  Description of Artificial Sequence: Synthetic polynucleotide
tggccagtttccaagacaggctcgctcgctcactcgggccggggccccaaaggggcccctagcgaccgcttcgcggtcgcggcccgagtgagcgagcgagcctgtcttggaaactggccagcactccggtgaggtaatgccgtcacgtggtcgggaatgggaacgggaaatctcgcgagaacgtaaacaaatataagacggcgccacacggcgctgcgtcatacgcgcgcgcgcaccggcgagatgaggtcgtactacgaggtcatcgttcagctgcccaacgacgtcgagagtcaggtacctggaatctccgattcgttcgtcaactggattacgtcgcgagaatggacgttgcctgaggacgccgattgggatttggaccaggtcgatcaagttcaactgacgctcggcgacaaaatccaacgggagattcgaactcattgggggacgatggccaaagaaccggactttcactattttatccaactggaacaaggtgaggtgttctttcatttacacgtcctgctggaaacgtgttccgtaaagccgatggtactcggaagatatatccgacatattcaacaaaaaattgtgagtaaagtctactgcgccacgagcctacgatggaaggatggatgcgtggtgaccaagaccaaaaatttcgggggcgcgaacaaggtccgggccgagtcgtatattcccgcctacctgatcccgaaacagcaaccggaagtgcagtgggcgtggactaacgtgcccgagtatataaaagcgtgcttgcaccgagaactgcgtgccagtctcgcgcgacttcacttcgaggaggcgggcgtctcgcaatccaaggaaaatctcgcgagaactgcagacggcgctcccgtgatgccgacccgcgtcagcaaacgctacatggagctcgtggattggctcgtggagaaggggatcaccaccgagaaggaatggctgctggaaaacagagaaagctttcggagctttcaggcctcgagcaactcggcgcgtcagatcaagacggccctgcaaggcgccattcaggagatgcttctgaccaagacggcggaggactacctcgtcggaaaggatcccgtctcggacgacgacatccgtcagaaccgcatctacaagattctggaactgaaccactacgacccagcgtacgtggggagtattttggtcgggtggtgccagaagaaatggggcaagcgaaacacgctgtggctgttcggacatgcgaccaccggcaagaccaacatcgcggaggctattgcccatgctgtgccgttctatggatgcgttaactggaccaacgagaactttccgttcaacgactgcgtcgaaaaaatgattatctggtgggaggagggcaaaatgaccgccaaagtggtggaaacagccaaggcgattctgggaggatctcgggtgagagtggaccaaaaatgcaaagcttcggttccgatcgaaccgacgccggtcattattaccagtaacaccaacatgtgttatgtcatcgacgggaacacgaccacgttcgagcataagcagccgttggaggacaggatgtttaagctcgaattgctgactcggttgcctgatgactttggtaaggtgaccaaacaggaggtgcgtcaattcttcaggtggtctcaggatcacctgacccctgtgatcccagaattcctagtgcggaaggcggagtctcgcaaaagacccgccccttccggggaaggctatataagcccgacaaagcggcccgcgctcgcagagcagcagcaggcgtcggagagcgcggacccggttcccaccaggtatcgtatcaaatgctcgaaacattgcggtatggataaaatgttgtttccttgccaaatttgtgaatcgatgaacagagatattaatatttgtgctattcataaaacgaccgactgtaaagagtgtttccccgactacggggataaagatgatgtagaactacccccctgtacagaacacaacgtgtctcgttgttatcaatgtcattcgggcgaattgtatcgcgtgacttcggactctgacgagaaacctgcccccgagagtgatgaaggcaccgagccatcctatgctccctgcacgattcaccacctgatgggcaagagtcacgggttagtcacttgcgcggcgtgtcggttgaaaaatagtacgttgcatgatgacttggatgacggtgatctcgaacaataaatgattgaaatgtagccatgtctctcatttctgatgcgattccagattggttggagcggttggtcaaaaagggagtgaatgctgcagctgatttctaccatttggaaagcggtcctcctcgtcctaaggcaaatcagcaaactcaagaatctcttgaaaaggacgattcgagaggtctcgtgttcccaggctacaattatctaggccctttcaacggtctagataaaggagaacccgtcaacgaggcagacgctgccgccttagaacacgacaaggcttacgacctcgaaatcaaggacgggcacaacccgtactttgagtacaacgaggccgacagacgtttccaggaacgtctcaaagacgatacctcctttggaggcaatttaggtaaagccatcttccaggccaaaaagagggttctcgaaccctttggtctggtggaagactcaaagacggctccgaccggagacaagcggaaaggcgaagacgaacctcgtttgcccgacacttcttcacagactcccaagaaaaacaagaagcctcgcaaggaaagaccttccggcggggcagaagatccgggcgaaggcacctcttccaacgctggagcagcagcacccgcctctagtgtgggatcatctatcatggctgaaggaggtggcggcccagtgggcgatgcaggccagggtgccgatggagtgggcaattcctccggaaattggcattgcgattcccaatggctggaaaacggagtcgtcactcgaaccacccgaacctgggtcttgcccagctacaacaaccacctgtacaaacgaatccaaggacccagcggaggcgacaacaacaacaaattctttggattcagcaccccctggggatactttgactacaatcgattccactgccacttttccccgcgagactggcaacgactcatcaacaacaactggggcatccgtcccaaagcgatgcgctttagactctttaacatccaggttaaagaggtcacggtccaagacttcaacaccaccatcggcaacaacctcaccagtacggtccaggtctttgcggacaaggactaccaactgccgtacgtcctcggatcggctaccgaaggcaccttcccgccgttcccagcggatatctacacgatcccgcagtacgggtactgcacgctaaactacaacaacgaggcggtggatcgttcggccttctactgtctggactactttccctcagacatgctgcggacaggaaataactttgagtttacttacaccttcgaggacgttcctttccatagcatgtttgcccacaaccagacgctagaccggctgatgaatcccctcgtggatcagtacctctgggctttcagctccgtcagccaagcaggctcatctggacgagctcttcattactcgcgggcgactaaaaccaacatggcggctcaatataggaactggttacctgggcctttcttccgtgatcagcaaatctttacgggcgctagcaacatcactaaaaataacgtctttagcgtttgggaaaaaggcaagcaatgggaactcgacaatcggaccaacctaatgcagcccggtcctgcggcagcgaccacctttagcggagaacctgaccgtcaagccatgcaaaacacgctggcttttagcaggaccgtctacgatcaaacgaccgccacgaccgatcgtaaccagatactcatcaccaacgaagacgaaatcagacccaccaactcggtcggtatcgacgcgtggggagcagttcccaccaacaaccagtcgatcgtgacccccggcactcgcgcggccgtcaacaatcaaggggcgcttcccgggatggtgtggcaaaacagagacatttaccctacagggacccatttggccaaaattcccgacactgacaatcacttccatccgtccccgcttattgggcggtttggctgcaagcatccccctccccagattttcattaaaaacacacccgtccctgccaacccttcggaaacgttccagacggccaaagtggcctccttcatcaaccagtactcgaccggacagtgcaccgtcgaaatcttttgggaactcaagaaggaaacctccaagcgctggaaccccgaaatccagttcacctccaactttggcaacgcggccgacatccagtttgccgtctccgacacgggatcctattccgaacctcgtcccatcggtacccgttaccttaccaaacctctgtaaattaaacccttcaataaaccgtttatgcgtaactgtatttccgtctcctgtcgttattcagtcacatgatgcggcattacctcaccggagtgctggccagtttccaagacaggctcgctcgctcactcgggccggggccccaaaggggcccctagcgaccgcttcgcggtcgcggcccgagtgagcgagcgagcctgtcttggaaactggcca

SEQ ID NO: 570 - DNA, 2211 bp, Artificial Sequence
  Description of Artificial Sequence: Synthetic polynucleotide
atggctgctgatggttatcttccagattggctcgaggacactctctctgaaggaataagacagtggtggaagctcaaacctggcccaccaccaccaaagcccgcagagcggcataaggacgacagcaggggtcttgtgcttcctgggtacaagtacctcggacccttcaacggactcgacaagggagagccggtcaacgaggcagacgcagcggccctcgagcacgacaaggcctacgaccagcagctcaaggccggtgacaacccctacctcaagtacaaccacgccgacgcggagttccagcagcggcttcagggcgacacatcgtttgggggcaacctcggcagagcagtcttccaggccaaaaagagggttcttgaacctcttggtctggttgagcaagcgggtgagacggctcctggaaagaagagaccgttgattgaatccccccagcagcccgactcctccacgggtatcggcaaaaaaggcaagcagccggctaaaaagagactcaattttggtcagactggcgactcagagtcagtccccgacccacaacctctcggagaacctccagcaacccccgctgctgtgggacctactacaatggcttcaggtggtggcgcaccaatggcagacaataacgaaggcgccgacggagtgggtaatgcctcaggaaattggcattgcgattccacatggctgggcgacagagtcatcaccaccagcacccgcacctgggccttgcccacctacaataaccacctctacaagcaaatctccagtgcttcaacgggggccagcaacgacaaccactacttcggctacagcaccccctgggggtattttgacttcaacagattccactgccacttttcaccacgtgactggcagcgactcatcaacaacaattggggattccggcccaagagactcaacttcaaactcttcaacatccaagtcaaggaggtcacgacgaatgatggcgtcacaaccatcgctaataaccttaccagcacggttcaagtcttctcggactcagactatcagctcccgtacgtgctcgggtcggctcacgagggctgcctcccgccgttcccagcagacgtcttcatggtgccacagtatggatacctcaccctgaacaacgggagtcaggcagtaggacgctcttcattttactgcctggagtactttccttctcagatgctgcgtaccggaaacaactttaccttcagctacacttttgaggacgttcctttccacagcagctacgctcacagccagagtctggaccgtctcatgaatcctctcatcgaccagtacctgtattacctgaacagaactcagaatcagtccggaagtgcccaaaacaaggacttgctgtttagccgggggtctccagctggcatgtctgttcagcccaaaaactggctacctggaccctgttatcggcagcagcgcgtttctaaaacaaaaacagacaacaacaacagcaactttacctggactggtgcttcaaaatataaccttaatgggcgtgaatctataatcaaccctggcactgctatggcctcacacaaagacgacaaagacaagttctttcccatgagcggtgtcatgatttttggaaaggagagcgccggagcttcaaacactgcattggacaatgtcatgatcacagacgaagaggaaatcaaagccactaaccccgtggccaccgaaagatttgggactgtggcagtcaatctccagagcagcagcacagaccctgcgaccggagatgtgcatgttatgggagccttacctggaatggtgtggcaagacagagacgtatacctgcagggtcccatttgggccaaaattcctcacacagatggacactttcacccgtctcctcttatgggcggctttggactcaagaacccgcctcctcagatcctcatcaaaaacacgcctgttcctgcgaatcctccggcggagttttcagctacaaagtttgcttcattcatcacccaatactccacaggacaagtgagtgtggaaattgaatgggagctgcagaaagaaaacagcaagcgctggaatcccgaagtgcagtacacatccaattatgcaaaatctgccaacgttgattttactgtggacaacaatggactttatactgagcctcgccccattggcacccgttacctcacccgtcccctgtaa

SEQ ID NO: 571 - protein, 736 aa, Artificial Sequence
  Description of Artificial Sequence: Synthetic polypeptide
MAADGYLPDWLEDTLSEGIRQWWKLKPGPPPPKPAERHKDDSRGLVLPGYKYLGPFNGLDKGEPVNEADAAALEHDKAYDQQLKAGDNPYLKYNHADAEFQQRLQGDTSFGGNLGRAVFQAKKRVLEPLGLVEQAGETAPGKKRPLIESPQQPDSSTGIGKKGKQPAKKRLNFGQTGDSESVPDPQPLGEPPATPAAVGPTTMASGGGAPMADNNEGADGVGNASGNWHCDSTWLGDRVITTSTRTWALPTYNNHLYKQISSASTGASNDNHYFGYSTPWGYFDFNRFHCHFSPRDWQRLINNNWGFRPKRLNFKLFNIQVKEVTTNDGVTTIANNLTSTVQVFSDSDYQLPYVLGSAHEGCLPPFPADVFMVPQYGYLTLNNGSQAVGRSSFYCLEYFPSQMLRTGNNFTFSYTFEDVPFHSSYAHSQSLDRLMNPLIDQYLYYLNRTQNQSGSAQNKDLLFSRGSPAGMSVQPKNWLPGPCYRQQRVSKTKTDNNNSNFTWTGASKYNLNGRESIINPGTAMASHKDDKDKFFPMSGVMIFGKESAGASNTALDNVMITDEEEIKATNPVATERFGTVAVNLQSSSTDPATGDVHVMGALPGMVWQDRDVYLQGPIWAKIPHTDGHFHPSPLMGGFGLKNPPPQILIKNTPVPANPPAEFSATKFASFITQYSTGQVSVEIEWELQKENSKRWNPEVQYTSNYAKSANVDFTVDNNGLYTEPRPIGTRYLTRPL

SEQ ID NO: 572 - DNA, 2211 bp, Artificial Sequence
  Description of Artificial Sequence: Synthetic polynucleotide
atggcttccgatggttatcttccagattggctcgaggacaacctctctgagggcatccgcgagtggtgggacttgaaacctggagccccgaaacccaaagccaaccagcaaaagcaggacgacggccggggtctggtgcttcctggctacaagtacctcggacccttcaacggactcgacaagggggagcccgtcaacgcggcggatgcagcggccctcgagcacgacaaggcctacgaccagcagctcagagcgggtgacaatccgtacctgcggtataaccacgccgacgccgagtttcaggagcgtctgcaagaagatacgtcttttgggggcaacctcgggcgagcagtcttccaggccaagaagagggttctcgaaccttttggtctggttgaggaaggtgctaagacggctcctggaaagaaacgtccggtagagcagtcgccacaagagccagactcctcctcgggcattggcaagacaggccagcagcccgctaaaaagagactcaattttggtcagactggcgactcagagtcagtccccgacccacaacctctcggagaacctccagcaacccccgctgctgtgggacctactacaatggcttcaggcggtggcgcaccaatggcagacaataacgaaggcgccgacggagtgggtaatgcctcaggaaattggcattgcgattccacatggctgggcgacagagtcatcaccaccagcacccgaacatgggccttgcccacctataacaaccacctctacaagcaaatctccagtgcttcaacgggggccagcaacgacaaccactacttcggctacagcaccccctgggggtattttgatttcaacagattccactgccatttctcaccacgtgactggcagcgactcatcaacaacaattggggattccggcccaagagactcaacttcaaactcttcaacatccaagtcaaggaggtcacgacgaatgatggcgtcacaaccatcgctaataaccttaccagcacggttcaagtcttctcggactcggagtaccagcttccgtacgtcctcggctctgcgcaccagggctgcctccctccgttcccggcggacgtgttcatgattccgcagtacggctacctaacgctcaacaatggcagccaggcagtgggacggtcatccttttactgcctggaatatttcccatcgcagatgctgagaacgggcaataactttaccttcagctacaccttcgaggacgtgcctttccacagcagctacgcgcacagccagagcctggaccggctgatgaatcctctcatcgaccagtacctgtattacctgaacagaactcagaatcagtccggaagtgcccaaaacaaggacttgctgtttagccgggggtctccagctggcatgtctgttcagcccaaaaactggctacctggaccctgttaccggcagcagcgcgtttctaaaacaaaaacagacaacaacaacagcaactttacctggactggtgcttcaaaatataaccttaatgggcgtgaatctataatcaaccctggcactgctatggcctcacacaaagacgacaaagacaagttctttcccatgagcggtgtcatgatttttggaaaggagagcgccggagcttcaaacactgcattggacaatgtcatgatcacagacgaagaggaaatcaaagccactaaccccgtggccaccgaaagatttgggactgtggcagtcaatctccagagcagcagcacagaccctgcgaccggagatgtgcatgttatgggagccttacctggaatggtgtggcaagacagagacgtatacctgcagggtcccatttgggccaaaattcctcacacagatggacactttcacccgtctcctcttatgggcggctttggacttaagcacccgcctcctcagatcctcatcaaaaacacgcctgttcctgcgaatcctccggcagagttttcggctacaaagtttgcttcattcatcacccagtattctactggccaagtcagcgtggagattgaatgggagctgcagaaagaaaacagcaaacgctggaatcccgaagtgcagtatacatctaactatgcaaaatctgccaacgttgatttcactgtggacaacaatggactttatactgagcctcgtcccattggcacccgttacctcacccgtcccctgtaa

SEQ ID NO: 573 - protein, 736 aa, Artificial Sequence
  Description of Artificial Sequence: Synthetic polypeptide
MASDGYLPDWLEDNLSEGIREWWDLKPGAPKPKANQQKQDDGRGLVLPGYKYLGPFNGLDKGEPVNAADAAALEHDKAYDQQLRAGDNPYLRYNHADAEFQERLQEDTSFGGNLGRAVFQAKKRVLEPFGLVEEGAKTAPGKKRPVEQSPQEPDSSSGIGKTGQQPAKKRLNFGQTGDSESVPDPQPLGEPPATPAAVGPTTMASGGGAPMADNNEGADGVGNASGNWHCDSTWLGDRVITTSTRTWALPTYNNHLYKQISSASTGASNDNHYFGYSTPWGYFDFNRFHCHFSPRDWQRLINNNWGFRPKRLNFKLFNIQVKEVTTNDGVTTIANNLTSTVQVFSDSEYQLPYVLGSAHQGCLPPFPADVFMIPQYGYLTLNNGSQAVGRSSFYCLEYFPSQMLRTGNNFTFSYTFEDVPFHSSYAHSQSLDRLMNPLIDQYLYYLNRTQNQSGSAQNKDLLFSRGSPAGMSVQPKNWLPGPCYRQQRVSKTKTDNNNSNFTWTGASKYNLNGRESIINPGTAMASHKDDKDKFFPMSGVMIFGKESAGASNTALDNVMITDEEEIKATNPVATERFGTVAVNLQSSSTDPATGDVHVMGALPGMVWQDRDVYLQGPIWAKIPHTDGHFHPSPLMGGFGLKHPPPQILIKNTPVPANPPAEFSATKFASFITQYSTGQVSVEIEWELQKENSKRWNPEVQYTSNYAKSANVDFTVDNNGLYTEPRPIGTRYLTRPL

SEQ ID NO: 574 - DNA, 2211 bp, Artificial Sequence
  Description of Artificial Sequence: Synthetic polynucleotide
atggctgctgatggttatcttccagattggctcgaggacactctctctgaaggaataagacagtggtggaagctcaaacctggcccaccaccaccaaagcccgcagagcggcataaggacgacagcaggggtcttgtgcttcctgggtacaagtacctcggacccttcaacggactcgacaagggagagccggtcaacgaggcagacgcagcggccctcgagcacgacaaggcctacgaccagcagctcaaggccggtgacaacccctacctcaagtacaaccacgccgacgcggagttccagcagcggcttcagggcgacacatcgtttgggggcaacctcggcagagcagtcttccaggccaaaaagagggttcttgaacctcttggtctggttgagcaagcgggtgagacggctcctggaaagaagagaccgttgattgaatccccccagcagcccgactcctccacgggtatcggcaaaaaaggcaagcagccggctaaaaagagactcaattttggtcagactggcgactcagagtcagtccccgacccacaacctctcggagaacctccagcaacccccgctgctgtgggacctactacaatggcttcaggtggtggcgcaccaatggcagacaataacgaaggcgccgacggagtgggtaatgcctcaggaaattggcattgcgattccacatggctgggcgacagagtcatcaccaccagcacccgcacctgggccttgcccacctacaataaccacctctacaagcaaatctccagtgcttcaacgggggccagcaacgacaaccactacttcggctacagcaccccctgggggtattttgacttcaacagattccactgccacttttcaccacgtgactggcagcgactcatcaacaacaattggggattccggcccaagagactcaacttcaaactcttcaacatccaagtcaaggaggtcacgacgaatgatggcgtcacaaccatcgctaataaccttaccagcacggttcaagtcttctcggactcagactatcagctcccgtacgtgctcgggtcggctcacgagggctgcctcccgccgttcccagcagacgtcttcatggtgccacagtatggatacctcaccctgaacaacgggagtcaggcagtaggacgctcttcattttactgcctggagtactttccttctcagatgctgcgtaccggaaacaactttaccttcagctacacttttgaggacgttcctttccacagcagctacgctcacagccagagtctggaccgtctcatgaatcctctcatcgaccagtacctgtattacctgaacagaactcagaatcagtccggaagtgcccaaaacaaggacttgctgtttagccgggggtctccaactggcatgtctgttcagcccaaaaactggctacctggaccctgttatcggcagcagcgcgtttctaaaacaaaaacagacaacaacaacagcaactttacctggactggtgcttcaaaatataaccttaatgggcgtgaatctataatcaaccctggcactgctatggcctcacacaaagacgacaaagacaagttctttcccatgagcggtgtcatgatttttggaaaggagagcgccggagcttcaaacactgcattggacaatgtcatgatcacagacgaagaggaaatcaaagccactaaccccgtggccactgaaagatttgggactgtggcagtcaatctccagagcagcagcacagaccctgcgaccggagatgtgcatgccatgggagccttacctggaatggtgtggcaagacagagacgtatacctgcagggtcctatttgggccaaaattcctcacacggatggacactttcacccgtctcctctcatgggcggctttggactcaagaacccgcctcctcagatcctcatcaaaaacacgcctgttcctgcgaatcctccggcggagttttcagctacaaagtttgcttcattcatcacccagtattccacaggacaagtgagcgtggagattgaatgggagctgcagaaagaaaacagcaaacgctggaatcccgaagtgcagtatacatctaactatgcaaaatctgccaacgttgatttcactgtggacaacaatggactttatactgagcctcgccccattggcacccgttacctcacccgtcccctgtaa

SEQ ID NO: 575 - protein, 736 aa, Artificial Sequence
  Description of Artificial Sequence: Synthetic polypeptide
MAADGYLPDWLEDTLSEGIRQWWKLKPGPPPPKPAERHKDDSRGLVLPGYKYLGPFNGLDKGEPVNEADAAALEHDKAYDQQLKAGDNPYLKYNHADAEFQQRLQGDTSFGGNLGRAVFQAKKRVLEPLGLVEQAGETAPGKKRPLIESPQQPDSSTGIGKKGKQPAKKRLNFGQTGDSESVPDPQPLGEPPATPAAVGPTTMASGGGAPMADNNEGADGVGNASGNWHCDSTWLGDRVITTSTRTWALPTYNNHLYKQISSASTGASNDNHYFGYSTPWGYFDFNRFHCHFSPRDWQRLINNNWGFRPKRLNFKLFNIQVKEVTTNDGVTTIANNLTSTVQVFSDSDYQLPYVLGSAHEGCLPPFPADVFMVPQYGYLTLNNGSQAVGRSSFYCLEYFPSQMLRTGNNFTFSYTFEDVPFHSSYAHSQSLDRLMNPLIDQYLYYLNRTQNQSGSAQNKDLLFSRGSPTGMSVQPKNWLPGPCYRQQRVSKTKTDNNNSNFTWTGASKYNLNGRESIINPGTAMASHKDDKDKFFPMSGVMIFGKESAGASNTALDNVMITDEEEIKATNPVATERFGTVAVNLQSSSTDPATGDVHAMGALPGMVWQDRDVYLQGPIWAKIPHTDGHFHPSPLMGGFGLKNPPPQILIKNTPVPANPPAEFSATKFASFITQYSTGQVSVEIEWELQKENSKRWNPEVQYTSNYAKSANVDFTVDNNGLYTEPRPIGTRYLTRPL

SEQ ID NO: 576 - DNA, 2211 bp, Artificial Sequence
  Description of Artificial Sequence: Synthetic polynucleotide
atggctgccgatggttatcttccagattggctcgaggacaacctctctgagggcattcgcgagtggtgggcgctgaaacctggagccccgaagcccaaagccaaccagcaaaagcaggacgacggccggggtctggtgcttcctggctacaagtacctcggacccttcaacggactcgacaagggggagcccgtcaacgcggcggatgcagcggccctcgagcacgacaaggcctacgaccagcagctcaaagcgggtgacaatccgtacctgcggtataaccacgccgacgccgagtttcaggagcgtctgcaagaagatacgtcttttgggggcaacctcgggcgagcagtcttccaggccaagaagcgggttctcgaacctctcggtctggttgaggaaggcgctaagacggctcctggaaagaaacgtccggtagagcaatcgccacaagagccagactcctcctcgggcatcggcaagacaggccagcagcccgctaaaaagagactcaattttggtcagactggcgactcagagtcagtccccgacccacaacctctcggagaacctccagcaacccccgctgctgtgggacctactacaatggcttcaggcggtggcgcaccaatggcagacaataacgaaggcgccgacggagtgggtaatgcctcaggaaattggcattgcgattccacatggctgggcgacagagtcatcaccaccagcacccgaacatgggccttgcccacctataacaaccacctctacaagcaaatctccagtgcttcgacgggggccagcaacgacaaccactacttcggctacagcaccccctgggggtattttgactttaacagattccactgccacttttcaccacgtgactggcagcgactcatcaacaacaactggggattccggcccaagagactcagcttcaagctcttcaacatccaggtcaaggaggtcacgacgaatgatggcgtcacaaccatcgctaataaccttaccagcacggttcaagtcttctcggactcggagtaccagcttccgtacgtcctcggctctgcgcaccagggctgcctccctccgttcccggcggacgtgttcatgattccgcaatacggctacctgacgctcaacaatggcagccaagccgtgggacgttcatccttttactgcctggaatatttcccttctcagatgctgagaacgggcaacaactttaccttcagctacacctttgaggaagtgcctttccacagcagctacgcgcacagccagagcctggaccggctgatgaatcctctcatcgatcaatacctgtattacctgaacagaactcaaaatcagtccggaagtgcccaaaacaaggacttgctgtttagccgtgggtctccagctggcatgtctgttcagcccaaaaactggctacctggaccctgttatcggcagcagcgcgtttctaaaacaaaaacagacaacaacaacagcaattttacctggactggtgcttcaaaatataacctcaatgggcgtgaatccatcatcaaccctggcactgctatggcctcacataaagacgacgaagacaagttctttcccatgagcggtgtcatgatttttggaaaagagagcgccggagcttcaaacactgcattggacaatgtcatgattacagacgaagaggaaattaaagccactaaccctgtggccaccgaaagatttgggaccgtggcagtcaatttccagagcagcagcacagaccctgcgaccggagatgtgcatgctatgggagcattacctggcatggtgtggcaagatagagacgtgtacctgcagggtcccatttgggccaaaattcctcacacagatggacactttcacccgtctcctcttatgggcggctttggactcaagaacccgcctcctcagatcctcatcaaaaacacgcctgttcctgcgaatcctccggcggagttttcagctacaaagtttgcttcattcatcacccaatactccacaggacaagtgagcgtggagattgaatgggagctgcagaaagaaaacagcaaacgctggaatcccgaagtgcagtatacatctaactatgcaaaatctgccaacattgatttcactgtggacaacaatggactttatactgagcctcgccccattggcacccgttacctcacccgtccccagtaa

SEQ ID NO: 577 - protein, 736 aa, Artificial Sequence
  Description of Artificial Sequence: Synthetic polypeptide
MAADGYLPDWLEDNLSEGIREWWALKPGAPKPKANQQKQDDGRGLVLPGYKYLGPFNGLDKGEPVNAADAAALEHDKAYDQQLKAGDNPYLRYNHADAEFQERLQEDTSFGGNLGRAVFQAKKRVLEPLGLVEEGAKTAPGKKRPVEQSPQEPDSSSGIGKTGQQPAKKRLNFGQTGDSESVPDPQPLGEPPATPAAVGPTTMASGGGAPMADNNEGADGVGNASGNWHCDSTWLGDRVITTSTRTWALPTYNNHLYKQISSASTGASNDNHYFGYSTPWGYFDFNRFHCHFSPRDWQRLINNNWGFRPKRLSFKLFNIQVKEVTTNDGVTTIANNLTSTVQVFSDSEYQLPYVLGSAHQGCLPPFPADVFMIPQYGYLTLNNGSQAVGRSSFYCLEYFPSQMLRTGNNFTFSYTFEEVPFHSSYAHSQSLDRLMNPLIDQYLYYLNRTQNQSGSAQNKDLLFSRGSPAGMSVQPKNWLPGPCYRQQRVSKTKTDNNNSNFTWTGASKYNLNGRESIINPGTAMASHKDDEDKFFPMSGVMIFGKESAGASNTALDNVMITDEEEIKATNPVATERFGTVAVNFQSSSTDPATGDVHAMGALPGMVWQDRDVYLQGPIWAKIPHTDGHFHPSPLMGGFGLKNPPPQILIKNTPVPANPPAEFSATKFASFITQYSTGQVSVEIEWELQKENSKRWNPEVQYTSNYAKSANIDFTVDNNGLYTEPRPIGTRYLTRPQ

SEQ ID NO: 578 - DNA, 2211 bp, Artificial Sequence
  Description of Artificial Sequence: Synthetic polynucleotide
atggctgccgatggttatcttccagattggctcgaggacaacctctctgagggcattcgcgagtggtgggacttgaaacctggagccccgaaacccaaagccaaccagcaaaagcaggacgacggccggggtctggtgcttcctggctacaagtacctcggacccttcaacggactcgacaagggggagcccgtcaacgcggcggatgcagcggccctcgagcacgacaaggcctacgaccagcagctcaaagcgggtgacaatccgtaccttcggtataaccacgccgacgccgagtttcaggagcgtctgcaagaagatacgtcttttgggggcaacctcgggcgagcagtcttccaggccaaaaagagggttctcgaacctctcggtctggttgaggaagcggctaagacggctcctggaaagaaacgtccggtagagcagtcgccacaagagccagactcctcctcgggcattggcaagacaggccagcagcccgctaaaaagagactcaattttggtcagactggcgactcagagtcagtccccgacccacaacctctcggagaacctcccgcagccccctcaggtgtgggatctcttacaatggcttcaggtggtggcgcaccaatggcagacaataacgaaggcgccgacggagtgggtaatgcctcaggaaattggcattgcgattccacatggctgggcgacagagtcatcaccaccagcacccgcacctgggccttgcccacctacaataaccacctctacaagcaaatctccagtgcttcaacgggggccagcaacgacaaccactacttcggctacagcaccccctgggggtattttgacttcaacagattccactgccacttttcaccacgtgactggcaaagactcatcaacaacaattggggattccggcccaagagactcaacttcaagctcttcaacatccaagtcaaggaggtcacgacgaatgatggcgtcacgaccatcgctaataaccttaccagcacggttcaagtcttctcggactcggagtaccagttgccgtacgtcctcggctctgcgcaccagggctgcctccctccgttcccggcggacgtgttcatgattccgcagtacggctacctaacgctcaacaatggcagccaggcagtgggacggtcatccttttactgcctggaatatttcccatcgcagatgctgagaacgggcaacaactttaccttcagctacacctttgaggaagtgcctttccacagcagctacgcgcacagccagagcctggaccggctgatgaatcctctcatcgaccagtacctgtattacctgaacagaactcaaaatcagtccggaagtgcccaaaacaaggacttgctgtttagccgtgggtctccagctggcatgtctgttcagcccaaaaactggctacctggaccctgttaccggcagcagtgcgtttctaaaacaaaaacagacaacaacaacagcaactttacctggactggtgcttcaaaatataaccttaatgggcgtgaatctataatcaaccctggcactgctatggcctcacacaaagacgacaaagacaagttctttcccatgagcggtgtcatgatttttggaaaggagagcgccggagcttcaaacactgcattggacaatgtcatgatcacagacgaagaggaaatcaaagccactaaccccgtggccaccgaaagatttgggactgtggcagtcaatctccagagcagcagcacagaccctgcgaccggagatgtgcatgttatgggagccttacctggaatggtgtggcaagacagagacgtatacctgcagggtcctatttgggccaaaattcctcacacagatggacactttcacccgtctcctcttatgggcggctttggactcaagaacccgcctcctcagatcctcatcaaaaacacgcctgttcctgcgaatcctccggcggagttttcagctacaaagtttgcttcattcatcacccaatactccacaggacaagtgagcgtggagattgaatgggagctgcagaaagaaaacagcaagcgctggaatcccgaagtgcagtacacatccaattatgcaaaatctgccaacgttgatttcactgtggacaacaatggactttatactgagcctcgccccattggcacccgttacctcacccgtcccctgtaa

SEQ ID NO: 579 - protein, 736 aa, Artificial Sequence
  Description of Artificial Sequence: Synthetic polypeptide
MAADGYLPDWLEDNLSEGIREWWDLKPGAPKPKANQQKQDDGRGLVLPGYKYLGPFNGLDKGEPVNAADAAALEHDKAYDQQLKAGDNPYLRYNHADAEFQERLQEDTSFGGNLGRAVFQAKKRVLEPLGLVEEAAKTAPGKKRPVEQSPQEPDSSSGIGKTGQQPAKKRLNFGQTGDSESVPDPQPLGEPPAAPSGVGSLTMASGGGAPMADNNEGADGVGNASGNWHCDSTWLGDRVITTSTRTWALPTYNNHLYKQISSASTGASNDNHYFGYSTPWGYFDFNRFHCHFSPRDWQRLINNNWGFRPKRLNFKLFNIQVKEVTTNDGVTTIANNLTSTVQVFSDSEYQLPYVLGSAHQGCLPPFPADVFMIPQYGYLTLNNGSQAVGRSSFYCLEYFPSQMLRTGNNFTFSYTFEEVPFHSSYAHSQSLDRLMNPLIDQYLYYLNRTQNQSGSAQNKDLLFSRGSPAGMSVQPKNWLPGPCYRQQCVSKTKTDNNNSNFTWTGASKYNLNGRESIINPGTAMASHKDDKDKFFPMSGVMIFGKESAGASNTALDNVMITDEEEIKATNPVATERFGTVAVNLQSSSTDPATGDVHVMGALPGMVWQDRDVYLQGPIWAKIPHTDGHFHPSPLMGGFGLKNPPPQILIKNTPVPANPPAEFSATKFASFITQYSTGQVSVEIEWELQKENSKRWNPEVQYTSNYAKSANVDFTVDNNGLYTEPRPIGTRYLTRPL

SEQ ID NO: 580 - DNA, 2211 bp, Artificial Sequence
  Description of Artificial Sequence: Synthetic polynucleotide
atggctgccgatggttatcttccagattggctcgaggacaacctctctgagggcattcgcgaatggtgggacttgaaacctggagccccgaaacccaaagtcaaccagcaaaagcaggacaacgctcggggtcttgtgcttccgggttacaaatacctcggacccttcaacggactcgacaagggggagcccgtcaacgcggcggacgcagcggccctcgagcacgacaaggcctacgaccagcagctcaaagcgggtgacaatccgtaccttcggtataaccacgccgacgccgagtttcaggagcgtctgcaagaagatacgtcttttgggggcaaccttggacgagcagtcttccaggccaagaagagggttctcgaaccttttggtctggttgaggaaggtgctaagacggctcctggaaagaaacgtccggtagagcagtcgccacaagagccagactcctcctcgggcattggcaagacaggccagcagcccgctaaaaagagactcaattttggtcagactggcgactcagagtcagtccccgacccacaacctctcggagaacctccagcaacccccgctgctgtgggacctactacaatggcttcaggcggtggcgcaccaatggcagacaataacgaaggcgccgacggagtgggtaatgcctcaggaaattggcattgcgattccacatggctgggcgacagagtcatcaccaccagcacccgcacctgggccttgcccacctacaataaccacctctacaagcaaatctccagtgcttcaacgggggccagcaacgacaaccactacttcggctacagcaccccctgggggtattttgacttcaacagattccactgccacttttcaccacgtgactggcaaagactcatcaacaacaattggggattccggcccaagagactcaacttcaagctcttcaacatccaagtcaaggaggtcacgacgaatgatggcgtcacgaccatcgctaataaccttaccagcacggttcaagtcttctcggactcggagtaccagttgccgtacgtcctcggctctgcgcaccagggctgcctccctccgttcccggcggacgtgttcatgattccgcaatacggctacctgacgctcaacaatggcagccaggcagtgggacggtcatccttttactgcctggaatatttcccatcgcagatgctgagaacgggcaataactttaccttcagctacacttttgaggacgttcctttccacagcagctacgctcacagccagagcctggaccggctgatgaatcctctcatcgaccagtacctgtattacctgaacagaactcagaatcagtccggaagtgcccaaaacaaggacttgctgtttagccgtgggtctccaactggcatgtctgttcagcccaaaaactggctacctggaccctgttatcggcagcagcgcgtttctaaaacaaaaacagacaacaacaacagcaactttacctggactggtgcttcaaaatataaccttaatgggcgtgaatctataatcaaccctggcactgctatggcctcacacaaagacgacgaagacaagttctttcccatgagcggtgtcatgatttttggaaaggagagcgccggagcttcaaacactgcattggacaatgtcatgatcacagacgaagaggaaatcaaagccactaaccccgtggccactgaaagatttgggactgtggcagtcaatctccagagcagcagcacagaccctgcgaccggagatgtgcatgccatgggagccttacctggaatggtgtggcaagacagagacgtatacctgcagggtcctatttgggccaaaattcctcacacggatggacactttcacccgtctcctctcatgggcggctttggacttaagcacccgcctcctcagatcctcatcaaaaacacgcctgttcctgcgaatcctccggcagagttttcggctacaaagtttgcttcattcatcacccagtattccacaggacaagtgagcgtggagattgaatgggagctgcagaaagaaaacagcaaacgctggaatcccgaagtgcagtatacatctaactatgcaaaatctgccaacgttgatttcactgtggacaacaatggactttatactgagcctcgccccattggcacccgttacctcacccgtcccctgtaa

SEQ ID NO: 581 - protein, 736 aa, Artificial Sequence
  Description of Artificial Sequence: Synthetic polypeptide
MAADGYLPDWLEDNLSEGIREWWDLKPGAPKPKVNQQKQDNARGLVLPGYKYLGPFNGLDKGEPVNAADAAALEHDKAYDQQLKAGDNPYLRYNHADAEFQERLQEDTSFGGNLGRAVFQAKKRVLEPFGLVEEGAKTAPGKKRPVEQSPQEPDSSSGIGKTGQQPAKKRLNFGQTGDSESVPDPQPLGEPPATPAAVGPTTMASGGGAPMADNNEGADGVGNASGNWHCDSTWLGDRVITTSTRTWALPTYNNHLYKQISSASTGASNDNHYFGYSTPWGYFDFNRFHCHFSPRDWQRLINNNWGFRPKRLNFKLFNIQVKEVTTNDGVTTIANNLTSTVQVFSDSEYQLPYVLGSAHQGCLPPFPADVFMIPQYGYLTLNNGSQAVGRSSFYCLEYFPSQMLRTGNNFTFSYTFEDVPFHSSYAHSQSLDRLMNPLIDQYLYYLNRTQNQSGSAQNKDLLFSRGSPTGMSVQPKNWLPGPCYRQQRVSKTKTDNNNSNFTWTGASKYNLNGRESIINPGTAMASHKDDEDKFFPMSGVMIFGKESAGASNTALDNVMITDEEEIKATNPVATERFGTVAVNLQSSSTDPATGDVHAMGALPGMVWQDRDVYLQGPIWAKIPHTDGHFHPSPLMGGFGLKHPPPQILIKNTPVPANPPAEFSATKFASFITQYSTGQVSVEIEWELQKENSKRWNPEVQYTSNYAKSANVDFTVDNNGLYTEPRPIGTRYLTRPL

SEQ ID NO: 582 - DNA, 2208 bp, Artificial Sequence
  Description of Artificial Sequence: Synthetic polynucleotide
  modified_base (955)..(955): n is a c, t, or g
  misc_feature (955)..(955): n is a, c, g, or t
  modified_base (971)..(972): n is a c, t, or g
  misc_feature (971)..(972): n is a, c, g, or t
  modified_base (981)..(981): n is a c, t, or g
  misc_feature (981)..(981): n is a, c, g, or t
  modified_base (986)..(986): n is a c, t, or g
  misc_feature (986)..(986): n is a, c, g, or t
  modified_base (1235)..(1235): n is a c, t, or g
  misc_feature (1235)..(1235): n is a, c, g, or t
  modified_base (1694)..(1696): n is a c, t, or g
  misc_feature (1694)..(1696): n is a, c, g, or t
  modified_base (1698)..(1698): n is a c, t, or g
  misc_feature (1698)..(1698): n is a, c, g, or t
  modified_base (1763)..(1765): n is a c, t, or g
  misc_feature (1763)..(1765): n is a, c, g, or t
  modified_base (1778)..(1778): n is a c, t, or g
  misc_feature (1778)..(1778): n is a, c, g, or t
  modified_base (2204)..(2204): n is a c, t, or g
  misc_feature (2204)..(2204): n is a, c, g, or t
atggctgccgatggttatcttccagattggctcgaggacaacctctctgagggcattcgcgaatggtgggacttgaaacctggagccccgaaacccaaagtcaaccagcaaaagcaggacaacgctcggggtcttgtgcttccgggttacaaatacctcggacccttcaacggactcgacaagggggagcccgtcaacgcggcggacgcagcggccctcgagcacgacaaggcctacgaccagcagctcaaagcgggtgacaatccgtaccttcggtataaccacgccgacgccgagtttcaggagcgtctgcaagaagatacgtcttttgggggcaaccttggacgagcagtcttccaggccaagaagagggttctcgaaccttttggtctggttgaggaaggtgctaagacggctcctggaaagaaacgtccggtagagcagtcgccacaagagccagactcctcctcgggcattggcaagacaggccagcagcccgctaaaaagagactcaattttggtcagactggcgactcagagtcagtccccgacccacaacctctcggagaacctccagcaacccccgctgctgtgggacctactacaatggcttcaggcggtggcgcaccaatggcagacaataacgaaggcgccgacggagtgggtaatgcctcaggaaattggcattgcgattccacatggctgggcgacagagtcatcaccaccagcacccgaacatgggccttgcccacctataacaaccacctctacaagcaaatctccagtgcttcaacgggggccagcaacgacaaccactacttcggctacagcaccccctgggggtattttgatttcaacagattccactgccacttttcaccacgtgactggcagcgactcatcaataacaattggggattccggcccaagagactcaacttcaaactcttcaacntccaagtcaaggaggnnacgacgaangatgncgtcacaaccatcgctaataaccttaccagcacggttcaagtcttctcggactcggagtaccagcttccgtacgtcctcggctctgcgcaccagggctgcctccctccgttcccggcggacgtgttcatgattccgcaatacggctacctgacgctcaacaatggcagccaggcagtgggacggtcatccttttactgcctggaatatttcccatcgcagatgctgagaacgggcaataactttacctncagctacacttttgaggacgttcctttccacagcagctacgctcacagccagagcctggaccggctgatgaatcctctcatcgaccagtacctgtattacctgaacagaactcagaatcagtccggaagtgcccaaaacaaggacttgctgtttagccgtgggtctccaactggcatgtctgttcagcccaaaaactggctacctggaccctgttatcggcagcagcgcgtttctaaaacaaaaacagacaacaacaacagcaactttacctggactggtgcttcaaaatataaccttaatgggcgtgaatctataatcaaccctggcactgctatggcctcacacaaagacgacgaagacaagttctttcccatgagcggtgtcatgatttttggaaaggagagcgccggagcttcaaacactgcattggacaatgtcatgatcacagacgaagagannncnaagccactaaccccgtggccactgaaagatttgggactgtggcagtcaatctccaagcagcacannnaccctgcgaccgnagatgtgcatgccatgggagccttacctggaatggtgtggcaagacagagacgtatacctgcagggtcctatttgggccaaaattcctcacacggatggacactttcacccgtctcctctcatgggcggctttggacttaagcacccgcctcctcagatcctcatcaaaaacacgcctgttcctgcgaatcctccggcagagttttcggctacaaagtttgcttcattcatcacccagtattccacaggacaagtgagcgtggagattgaatgggagctgcagaaagaaaacagcaaacgctggaatcccgaagtgcagtatacatctaactatgcaaaatctgccaacgttgatttcactgtggacaacaatggactttatactgagcctcgccccattggcacccgttacctcacccgtccccngtaa

SEQ ID NO: 583 - protein, 723 aa, Artificial Sequence
  Description of Artificial Sequence: Synthetic polypeptide
MAADGYLPDWLEDNLSEGIREWWDLKPGAPKPKVNQQKQDNARGLVLPGYKYLGPFNGLDKGEPVNAADAAALEHDKAYDQQLKAGDNPYLRYNHADAEFQERLQEDTSFGGNLGRAVFQAKKRVLEPFGLVEEGAKTAPGKKRPVEQSPQEPDSSSGIGKTGQQPAKKRLNFGQTGDSESVPDPQPLGEPPATPAAVGPTTMASGGGAPMADNNEGADGVGNASGNWHCDSTWLGDRVITTSTRTWALPTYNNHLYKQISSASTGASNDNHYFGYSTPWGYFDFNRFHCHFSPRDWQRLINNNWGFRPKRLNFKLFNQVKETTDVTTIANNLTSTVQVFSDSEYQLPYVLGSAHQGCLPPFPADVFMIPQYGYLTLNNGSQAVGRSSFYCLEYFPSQMLRTGNNFTSYTFEDVPFHSSYAHSQSLDRLMNPLIDQYLYYLNRTQNQSGSAQNKDLLFSRGSPTGMSVQPKNWLPGPCYRQQRVSKTKTDNNNSNFTWTGASKYNLNGRESIINPGTAMASHKDDEDKFFPMSGVMIFGKESAGASNTALDNVMITDEEATNPVATERFGTVAVNLQSSPATDVHAMGALPGMVWQDRDVYLQGPIWAKIPHTDGHFHPSPLMGGFGLKHPPPQILIKNTPVPANPPAEFSATKFASFITQYSTGQVSVEIEWELQKENSKRWNPEVQYTSNYAKSANVDFTVDNNGLYTEPRPIGTRYLTRP

SEQ ID NO: 584 - DNA, 2208 bp, Artificial Sequence
  Description of Artificial Sequence: Synthetic polynucleotide
atggctgccgatggttatcttccagattggctcgaggacactctctctgaaggaataagacagtggtggaagctcaaacctggcccaccaccaccaaagcccgcagagcggcataaggacgacagcaggggtcttgtgcttcctgggtacaagtacctcggacccttcaacggactcgacaagggagagccggtcaacgaggcagacgccgcggccctcgagcacgacaaagcctatgaccggcagctcgacagcggagacaacccgtacctcaagtacaaccacgccgacgcggagtttcaggagcgccttaaagaagatacgtcttttgggggcaacctcggacgagcagtcttccaggcgaaaaagagggttcttgaacctctgggcctggttgaggaacctgttaagacggctccgggaaaaaagaggccggtagagcactctcctgtggagccagactcctcctcgggaaccggaaaggcgggtcagcagcctgcaagaaaaagattgaattttggtcagactggagacgcagactcagtacctgacccccagcctctcggacagccaccagcagccccctctggtctgggaactaatacgatggctacaggcagtggcgcaccaatggcagacaataacgagggcgccgacggagtgggtaattcctcgggaaattggcattgcgattccacatggatgggcgacagagtcatcaccaccagcacccgaacctgggccctgcccacctacaacaaccacctctacaaacaaatttccagccaatcaggagcctcgaacgacaatcactactttggctacagcaccccttgggggtattttgacttcaacagattccactgccacttttcaccacgtgactggcaaagactcatcaacaacaactggggattccgacccaagagactcaagttcaagctctttaacattcaagtcaaagaggtcacgcagaatgacggtacgacgacgattgccaataaccttaccagcacggttcaggtgtttactgactcggagtaccagctcccgtacgtcctcggctcggcgcatcaaggatgcctcccgccgttcccagcagacgtcttcatggtgccacagtatggatacctcaccctgaacaacgggagtcaggcagtaggacgctcttcattttactgcctggagtactttccttctcagatgctgcgtaccggtaacaactttaccttcagctacacttttgaggacgttcctttccacagcagctacgctcacagccagagtctggaccgtctcatgaatcctctcatcgaccagtacctgtattacttgagcagaacagacgctccaagtggaaccaccacgcagtcaaggcttcagttttctcaggccggagcgagtgacattcgggaccagtctaggaactggcttcctggaccctgttaccgccagcagcgagtatcaaagacatctgcggataacaacaacagtgaatactcgtggactggagctaccaagtaccacctcaatggcagagactctctggtgaatccgggcccggccatggcaagccacaaggacgatgaagaaaagttttttcctcagagcggggttctcatctttgggaagcaaggctcagagaaaacaagtgtggacattgaaaaggtcatgattacagacgaagaggaaatcaggacaaccaatcccgtggctacggagcagtatggttctgtatctaccaacctccagagaggcaacagacaagcagctaccgcagatgtcaacacacaaggcgttcttccaggcatggtctggcaggacagagatgtgtaccttcaggggcccatctgggcaaagattccacacacggacggacattttcacccctctcccctcatgggtggattcggacttaaacaccctcctccacagattctcatcaagaacaccccggtacctgcgaatccttcgaccaccttcagtgcggcaaagtttgcttccttcatcacacagtactccacgggacaggtcagcgtggagatcgagtgggagctgcagaaggaaaacagcaaacgctggaatcccgaagttcagtacacttccaactacaacaagtctgttaatgtggactttactgtggacactaatggcgtgtattcagagcctcgccccattggcaccagatacctgactcgtaatctgtaa

SEQ ID NO: 585 - protein, 735 aa, Artificial Sequence
  Description of Artificial Sequence: Synthetic polypeptide
MAADGYLPDWLEDTLSEGIRQWWKLKPGPPPPKPAERHKDDSRGLVLPGYKYLGPFNGLDKGEPVNEADAAALEHDKAYDRQLDSGDNPYLKYNHADAEFQERLKEDTSFGGNLGRAVFQAKKRVLEPLGLVEEPVKTAPGKKRPVEHSPVEPDSSSGTGKAGQQPARKRLNFGQTGDADSVPDPQPLGQPPAAPSGLGTNTMATGSGAPMADNNEGADGVGNSSGNWHCDSTWMGDRVITTSTRTWALPTYNNHLYKQISSQSGASNDNHYFGYSTPWGYFDFNRFHCHFSPRDWQRLINNNWGFRPKRLKFKLFNIQVKEVTQNDGTTTIANNLTSTVQVFTDSEYQLPYVLGSAHQGCLPPFPADVFMVPQYGYLTLNNGSQAVGRSSFYCLEYFPSQMLRTGNNFTFSYTFEDVPFHSSYAHSQSLDRLMNPLIDQYLYYLSRTDAPSGTTTQSRLQFSQAGASDIRDQSRNWLPGPCYRQQRVSKTSADNNNSEYSWTGATKYHLNGRDSLVNPGPAMASHKDDEEKFFPQSGVLIFGKQGSEKTSVDIEKVMITDEEEIRTTNPVATEQYGSVSTNLQRGNRQAATADVNTQGVLPGMVWQDRDVYLQGPIWAKIPHTDGHFHPSPLMGGFGLKHPPPQILIKNTPVPANPSTTFSAAKFASFITQYSTGQVSVEIEWELQKENSKRWNPEVQYTSNYNKSVNVDFTVDTNGVYSEPRPIGTRYLTRNL

SEQ ID NO: 586 - DNA, 2208 bp, Artificial Sequence
  Description of Artificial Sequence: Synthetic polynucleotide
atggctgccgatggttatcttccagattggctcgaggacactctctctgaaggaataagacagtggtggaagctcaaacctggcccaccaccaccaaagcccgcagagcggcataaggacgacagcaggggtcttgtgcttcctgggtacaagtacctcggacccttcaacggactcgacaagggagagccggtcaacgaggcagacgccgcggccctcgagcacgacaaagcctatgaccggcagctcgacagcggagacaacccgtacctcaagtacaaccacgccgacgcggagtttcaggagcgccttaaagaagatacgtcttttgggggcaacctcggacgagcagtcttccaggcgaaaaagagggttcttgaacctctgggcctggttgaggaacctgttaagacggctccgggaaaaaagaggccggtagagcactctcctgtggagccagactcctcctcgggaaccggaaaggcgggccagcagcctgcaagaaaaagattgaattttggtcagactggagacgcaaactcagtacctgacccccagcctctcggacagccaccagcagccccctctggtctgggaactaatacgatggctacaggcagtggcgcaccaatggcagacaataacgagggcgccgacggagtgggtaattcctcgggaaattggcattgcgattccacatggatgggcgacagagtcatcaccaccagcacccgaacctgggccctgcccacctacaacaaccacctctacaaacaaatttccagccaatcaggagcctcgaacgacaatcactactttggctacagcaccccttgggggtattttgacttcaacagattccactgccacttttcaccacgtgactggcaaagactcatcaacaacaactggggattccgacccaagagactcaagttcaagctctttaacattcaagtcaaagaggtcacgcagaatgacggtacgacgacgattgccaataaccttaccagcacggttcaggtgtttactgactcggagtaccagctcccgtacgtcctcggctcggcgcatcaaggatgcctcccgccgttcccagcagacgtcttcatggtgccacagtatggatacctcaccctgaacaacgggagtcgggcagtaggacgctcttcattttactgcctggagtactttccttctcagatgctgcgtaccggtaacaactttaccttcagctacacttttgaggacgttcctttccacagcagctacgctcacagccagagtctggaccgtctcatgaatcctctcatcgaccagtacctgtattacttgagcagaacagacactccaagtggaaccaccacgcagtcaaggcttcagttttctcaggccggagcgagtgacattcgggaccagtctaggaactggcttcctggaccctgttaccgccagcagcgagtatcaaagacatctgcggataacaacaacagtgaatactcgtggactggagctaccaagtaccacctcaatggcagagactctctggtgaatccgggcccggccatggcaagccacaaggacgatgaagaaaagttttttcctcagagcggggttctcatctttgggaagcaaggctcagagaaaacaagtgtggacattgaaaaggtcatgattacagacgaagaggaaatcaggacgaccaatcccgtggctacggagcagtatggttctgtatctaccaacctccagagaggcaacagacaagcagctaccgcagatgtcaacacacaaggcgttcttccaggcatggtctggcaggacagagatgtgtaccttcaggggcccatctgggcaaagattccacacacggacggacattttcacccctctcccctcatgggtggattcggacttaaacaccctcctccacagattctcatcaagaacaccccggtacctgcgaatccttcgaccaccttcagtgcggcaaagtttgcttccttcatcacacagtactccacgggacaggtcagcgtggagatcgagtgggagctgcagaaggaaaacagcaaacgctggaatcccgaagttcagtacacttccaactacaacaagtctgttaatgtggactttactgtggacactaatggcgtgtatacagagcctcgccccattggcaccagatacctgactcgtaatctgtaa

SEQ ID NO: 587 - protein, 735 aa, Artificial Sequence
  Description of Artificial Sequence: Synthetic polypeptide
MAADGYLPDWLEDTLSEGIRQWWKLKPGPPPPKPAERHKDDSRGLVLPGYKYLGPFNGLDKGEPVNEADAAALEHDKAYDRQLDSGDNPYLKYNHADAEFQERLKEDTSFGGNLGRAVFQAKKRVLEPLGLVEEPVKTAPGKKRPVEHSPVEPDSSSGTGKAGQQPARKRLNFGQTGDANSVPDPQPLGQPPAAPSGLGTNTMATGSGAPMADNNEGADGVGNSSGNWHCDSTWMGDRVITTSTRTWALPTYNNHLYKQISSQSGASNDNHYFGYSTPWGYFDFNRFHCHFSPRDWQRLINNNWGFRPKRLKFKLFNIQVKEVTQNDGTTTIANNLTSTVQVFTDSEYQLPYVLGSAHQGCLPPFPADVFMVPQYGYLTLNNGSRAVGRSSFYCLEYFPSQMLRTGNNFTFSYTFEDVPFHSSYAHSQSLDRLMNPLIDQYLYYLSRTDTPSGTTTQSRLQFSQAGASDIRDQSRNWLPGPCYRQQRVSKTSADNNNSEYSWTGATKYHLNGRDSLVNPGPAMASHKDDEEKFFPQSGVLIFGKQGSEKTSVDIEKVMITDEEEIRTTNPVATEQYGSVSTNLQRGNRQAATADVNTQGVLPGMVWQDRDVYLQGPIWAKIPHTDGHFHPSPLMGGFGLKHPPPQILIKNTPVPANPSTTFSAAKFASFITQYSTGQVSVEIEWELQKENSKRWNPEVQYTSNYNKSVNVDFTVDTNGVYTEPRPIGTRYLTRNL

SEQ ID NO: 588 - DNA, 2211 bp, Artificial Sequence
  Description of Artificial Sequence: Synthetic polynucleotide
atggctgccgatggttatcttccagattggctcgaggacactctctctgaaggaataagacagtggtggaagctcaaacctggcccaccaccaccaaagcccgcagagcggcataaggacgacagcaggggtcttgtgcttcctgggtacaagtacctcggacccttcaacggactcgacaagggagagccggtcaacgaggcagacgccgcggccctcgagcacgacaaggcctacgaccagcagctcaaagcgggtgacaatccgtacctgcggtataaccacgccgacgccgagtttcaggagcgtctgcaagaagatacgtcttttgggggcaacctcgggcgagcagtcttccaggccaagaagcgggttctcgaacctctcggtctggttgaggaaggcgctaagacggctcctggaaagaaacgtccggtagagcagtcgccacaagagccagactcctcctcgggcatcggcaagacaggccagcagcccgctaaaaagagactcaattttggtcagactggcgactcagagtcagtccccgacccacaacctctcggagaacctccagcaacccccgctgctgtgggacctactacaatggcttcaggcggtggcgcaccaatggcagacaataacgaaggcgccgacggagtgggtaatgcctcaggaaattggcattgcgattccacatggctgggcgacagagtcatcaccaccagcacccgaacatgggccttgcccacctataacaaccacctctacaagcaaatctccagtgcttcgacgggggccagcaacgacaaccactacttcggctacagcaccccctgggggtattttgactttaacagattccactgccacttttcaccacgtgactggcagcgactcatcaacaataactggggattccggcccaagagactcagcttcaagctcttcaacatccaggtcaaggaggtcacgacgaatgatggcgtcacaaccatcgctaataaccttaccagcacggttcaagtcttctcggactcggagtaccagcttccgtacgtcctcggctctgcgcaccagggctgcctccctccgttcccggcggacgtgttcatgattccgcaatacggctacctgacgctcaacaatggcagccaagccgtgggacgttcatccttttactgcctggaatatttcccttctcagatgctgagaacgggcaacaactttaccttcagctacacctttgaggaagtgcctttccacagcagctacgcgcacagccagagcctggaccggctgatgaatcctctcatcgatcaatacctgtattacctgaacagaactcaaaatcagtccggaagtgcccaaaacaaggacttgctgtttagccgtgggtctccagctggcatgtctgttcagcccaaaaactggctacctggaccctgttatcggcagcagcgcgtttctaaaacaaaaacagacaacaacaacagcaattttacctggactggtgcttcaaaatataacctcaatgggcgtgaatccatcatcaaccctggcactgctatggcctcacacaaagacgacgaagacaagttctttcccatgagcggtgtcatgatttttggaaaagagagcgccggagcttcaaacactgcattggacaatgtcatgattacggacgaagaggaaattaaagccactaaccctgtggccaccgaaagatttgggaccgtggcagtcaatttccagagcagcagcacagaccctgcgaccggagatgtgcatgctatgggagcattacctggcatggtgtggcaagatagagacgtgtacctgcagggtcccatttgggccaaaattcctcacacagatggacactttcacccgtctcctcttatgggcggctttggactcaagaacccgcctcctcagatcctcatcaaaaacacgcctgttcctgcgaatcctccggcggagttttcagctacaaagtttgcttcattcatcactcaatactccacaggacaagtgagcgtggaaattgaatgggagctgcagaaagaaaacagcaaacgctggaatcccgaagtgcagtatacatctaactatgcaaaatctgccaacgttgatttcactgtggacaacaatggactttatactgagcctcgccccattggcacccgttacctcacccgtcccctgtaa

SEQ ID NO: 589 - protein, 736 aa, Artificial Sequence
  Description of Artificial Sequence: Synthetic polypeptide
MAADGYLPDWLEDTLSEGIRQWWKLKPGPPPPKPAERHKDDSRGLVLPGYKYLGPFNGLDKGEPVNEADAAALEHDKAYDQQLKAGDNPYLRYNHADAEFQERLQEDTSFGGNLGRAVFQAKKRVLEPLGLVEEGAKTAPGKKRPVEQSPQEPDSSSGIGKTGQQPAKKRLNFGQTGDSESVPDPQPLGEPPATPAAVGPTTMASGGGAPMADNNEGADGVGNASGNWHCDSTWLGDRVITTSTRTWALPTYNNHLYKQISSASTGASNDNHYFGYSTPWGYFDFNRFHCHFSPRDWQRLINNNWGFRPKRLSFKLFNIQVKEVTTNDGVTTIANNLTSTVQVFSDSEYQLPYVLGSAHQGCLPPFPADVFMIPQYGYLTLNNGSQAVGRSSFYCLEYFPSQMLRTGNNFTFSYTFEEVPFHSSYAHSQSLDRLMNPLIDQYLYYLNRTQNQSGSAQNKDLLFSRGSPAGMSVQPKNWLPGPCYRQQRVSKTKTDNNNSNFTWTGASKYNLNGRESIINPGTAMASHKDDEDKFFPMSGVMIFGKESAGASNTALDNVMITDEEEIKATNPVATERFGTVAVNFQSSSTDPATGDVHAMGALPGMVWQDRDVYLQGPIWAKIPHTDGHFHPSPLMGGFGLKNPPPQILIKNTPVPANPPAEFSATKFASFITQYSTGQVSVEIEWELQKENSKRWNPEVQYTSNYAKSANVDFTVDNNGLYTEPRPIGTRYLTRPL

SEQ ID NO: 590 - protein, 735 aa, Artificial Sequence
  Description of Artificial Sequence: Synthetic polypeptide
MAADGYLPDWLEDTLSEGIRQWWKLKPGPPPPKPAERHKDDSRGLVLPGYKYLGPFNGLDKGEPVNEADAAALEHDKAYDRQLDSGDNPYLKYNHADAEFQERLKEDTSFGGNLGRAVFQAKKRVLEPLGLVEEPVKTAPGKKRPVEHSPVEPDSSSGTGKAGQQPARKRLNFGQTGDADSVPDPQPLGQPPAAPSGLGTNTMATGSGAPMADNNEGADGVGNSSGNWHCDSTWMGDRVITTSTRTWALPTYNNHLYKQISSQSGASNDNHYFGYSTPWGYFDFNRFHCHFSPRDWQRLINNNWGFRPKRLKFKLFNIQVKEVTQNDGTTTIANNLTSTVQVFTDSEYQLPYVLGSAHQGCLPPFPADVFMVPQYGYLTLNNGSQAVGRSSFYCLEYFPSQMLRTGNNFTFSYTFEDVPFHSSYAHSQSLDRLMNPLIDQYLYYLSRTDTPSGTTTQSRLQFSQAGASDIRNQSRNWLPGPCYRQQRVSKTSADNNNSEYSWTGATKYHLNGRDSLVNPGPAMASHKDDEEKFFPQSGVLIFGKQGSEKTSVDIEKVMITDEEEIRTTNPVATEQYGSVSTNLQRGNRQAATADVNTQGVLPGMVWQDRDVYLQGPIWAKIPHTDGHFHPSPLMGGFGLKHPPPQILIKNTPVPANPSTTFSAAKFASFITQYSTGQVSVEIEWELQKENSKRWNPEVQYTSNYNKSVNVDFTVDTNGVYSEPRPIGTRYLTRNQ

SEQ ID NO: 591 - DNA, 2208 bp, Artificial Sequence
  Description of Artificial Sequence: Synthetic polynucleotide
atggctgccgatggttatcttccagattggctcgaggacactctctctgaaggaataagacagtggtggaagctcaaacctggcccaccaccaccaaagcccgcagagcggcataaggacgacagcaggggtcttgtgcttcctgggtacaagtacctcggacccttcaacggactcgacaagggagagccggtcaacgaggcagacgccgcggccctcgagcacgacaaagcctatgaccggcagctcgacagcggagacaacccgtacctcaagtacaaccacgccgacgcggagtttcaggaacgccttaaagaagatacgtcttttgggggcaacctcggacgagcagtcttccaggcgaaaaagagggttcttgaacctctgggcctggttgaggaacctgttaagacggctccgggaaaaaagaggccggtagagcactctcctgtggagccagactcctcctcgggaaccggaaaggcgggccagcagcctgcaagaaaaagattgaattttggtcagactggagacgcagactcagtacctgacccccagcctctcggacagccaccagcagccccctctggtctgggaactaatacgatggctacaggcagtggcgcaccaatggcagacaataacgagggcgccgacggagtgggtaattcctcgggaaattggcattgcgattccacatggatgggcgacagagtcatcaccaccagcacccgaacctgggccctgcccacctacaacaaccacctctacaaacaaatttccagccaatcaggagcctcgaacgacaatcactactttggctacagcaccccttgggggtattttgacttcaacagattccactgccacttttcaccacgtgactggcaaagactcatcaacaacaactggggattccgacccaagagactcaagttcaagctctttaacattcaagtcaaagaggtcacgcagaatgacggtacgacgacgattgccaataaccttaccagcacggttcaggtgtttactgactcggagtaccagctcccgtacgtcctcggctcggcgcatcaaggatgcctcccgccgttcccagcagacgtcttcatggtgccacagtatggatacctcaccctgaacaacgggagtcaggcagtaggacgctcttcattttactgcctggagtactttccttctcagatgctgcgtaccggtaacaactttaccttcagctacacttttgaggacgttcctttccacagcagctacgctcacagccagagtctggaccgtctcatgaatcctctcatcgaccagtacctgtattacttgagcagaacagacactccaagtggaaccaccacgcagtcaaggcttcagttttctcaggccggagcgagtgacattcggaaccagtctaggaactggcttcctggaccctgttaccgccagcagcgagtatcaaagacatctgcggataacaacaacagtgaatactcgtggactggagctaccaagtaccacctcaatggcagagactctctggtgaatccgggcccggccatggcaagccacaaggacgatgaagaaaagttttttcctcagagcggggttctcatctttgggaagcaaggctcagagaaaacaagtgtggacattgaaaaggtcatgattacagacgaagaggaaatcaggacaaccaatcccgtggctacggagcagtatggttctgtatctaccaacctccagagaggcaacagacaagcagctaccgcagatgtcaacacacaaggcgttcttccaggcatggtctggcaggacagagatgtgtaccttcaggggcccatctgggcaaagattccacacacggacggacattttcacccctctcccctcatgggtggattcggacttaaacaccctcctccacagattctcatcaagaacaccccggtacctgcgaatccttcgaccaccttcagtgcggcaaagtttgcttccttcatcacacagtactccacgggacaggtcagcgtggagatcgagtgggagctgcagaaggaaaacagcaaacgctggaatcccgaagttcagtacacttccaactacaacaagtctgttaatgtggactttactgtggacactaatggcgtgtattcagagcctcgccccattggcaccagatacctgactcgtaatcagtaa

SEQ ID NO: 592 - DNA, 2208 bp, Artificial Sequence
  Description of Artificial Sequence: Synthetic polynucleotide
atggctgccgatggttatcttccagattggctcgaggacactctctctgaaggaataagacagtggtggaagctcaaacctggcccaccaccaccaaagcccgcagagcggcataaggacgacagcaggggtcttgtgcttcctgggtacaagtacctcggacccttcaacggactcgacaagggagagccggtcaacgaggcagacgccgcggccctcgagcacgacaaagcctatgaccggcagctcgacagcggagacaacccgtacctcaagtacaaccacgccgacgcggagtttcaggagcgccttaaagaagatacgtcttttgggggcaacctcggacgagcagtcttccaggcgaaaaagagggttcttgaacctctgggcctggttgaggaacctgttaagacggctccgggaaaaaagaggccggtagagcactctcctgtggagccagactcctcctcgggaaccggaaaggcgggccagcagcctgcaagaaaaagattgaattttggtcagactggagacgcagactcagtacctgatccccagcctctcggacagccaccagcagccccctctggtctgggaactaatacgatggctacaggcagtggcgcaccaatggcagacaataacgagggcgccgacggagtgggtaattcctcgggaaattggcattgcgattccacatggatgggcgacagagtcatcaccaccagcacccgaacctgggccctgcccacctacaacaaccacctctacaaacaaatttccagccaatcaggagcctcgaacgacaatcactactttggctacagcaccccttgggggtattttgacttcaacagattccactgccacttttcaccacgtgactggcaaagactcatcaacaacaactggggattccgacccaagagactcaagttcaagctctttaacattcaagtcaaagaggtcacgcagaatgacggtacgacgacgattgccaataaccttaccagcacggttcaggtgtttactgactcggagtaccagctcccgtatgtcctcggctcggcgcatcaaggatgcctcccgccgttcccagcagacgtcttcatggtgccacagtatggatacctcaccctgaacaacgggagtcaggcagtaggacgctcttcattttactgcctggagtactttccttctcagatgctgcgtaccggtaacaactttaccttcagctacacttttgaggacgttcctttccacagcagctacgctcacagccagagtctggaccgtctcatgaatcctctcatcgaccagtacctgtattacttgagcagaacagacactccaagtggaaccaccacgcagtcaaggcttcagttttctcaggccggagcgagtgacattcgggaccagtctaggaactggcttcctggaccctgttaccgccagcagcgagtatcaaagacatctgcggataacaacaacagtgaatactcgtggactggagctaccaagtaccacctcaatggcagagactctctggtgaatccgggcccggccatggcaagccacaaggacgatgaagaaaagttttttcctcagagcggggttctcatctttgggaagcaaggctcagagaaaacaagtgtggacattgaaaaggtcatgattacagacgaagaggaaatcaggacaaccaatcccgtggctacggagcagtatggttctgtatctaccaacctccagagaggcaacagacaagcagctaccgcagatgtcaacacacaaggcgttcttccaggcatggtctggcaggacagagatgtgtaccttcaggggcccatctgggcaaagattccacacacggacggacattttcacccctctcccctcatgggtggattcggacttaaacaccctcctccacagattctcatcaagaacaccccggtacctgcgaatccttcgaccaccttcagtgcggcaaagtttgcttccttcatcacacagtactccacgggacaggtcagcgtggagatcgagtgggagctgcagaaggaaaacagcaaacgctggaatcccgaagttcagtacacttccaactacaacaagtctgttaatgtggactttactgtggacactaatggcgtgtattcagagcctcgccccattggcaccagatacctgactcgtaatctgtaa

SEQ ID NO: 593 - protein, 735 aa, Artificial Sequence
  Description of Artificial Sequence: Synthetic polypeptide
MAADGYLPDWLEDTLSEGIRQWWKLKPGPPPPKPAERHKDDSRGLVLPGYKYLGPFNGLDKGEPVNEADAAALEHDKAYDRQLDSGDNPYLKYNHADAEFQERLKEDTSFGGNLGRAVFQAKKRVLEPLGLVEEPVKTAPGKKRPVEHSPVEPDSSSGTGKAGQQPARKRLNFGQTGDADSVPDPQPLGQPPAAPSGLGTNTMATGSGAPMADNNEGADGVGNSSGNWHCDSTWMGDRVITTSTRTWALPTYNNHLYKQISSQSGASNDNHYFGYSTPWGYFDFNRFHCHFSPRDWQRLINNNWGFRPKRLKFKLFNIQVKEVTQNDGTTTIANNLTSTVQVFTDSEYQLPYVLGSAHQGCLPPFPADVFMVPQYGYLTLNNGSQAVGRSSFYCLEYFPSQMLRTGNNFTFSYTFEDVPFHSSYAHSQSLDRLMNPLIDQYLYYLSRTDTPSGTTTQSRLQFSQAGASDIRDQSRNWLPGPCYRQQRVSKTSADNNNSEYSWTGATKYHLNGRDSLVNPGPAMASHKDDEEKFFPQSGVLIFGKQGSEKTSVDIEKVMITDEEEIRTTNPVATEQYGSVSTNLQRGNRQAATADVNTQGVLPGMVWQDRDVYLQGPIWAKIPHTDGHFHPSPLMGGFGLKHPPPQILIKNTPVPANPSTTFSAAKFASFITQYSTGQVSVEIEWELQKENSKRWNPEVQYTSNYNKSVNVDFTVDTNGVYSEPRPIGTRYLTRNL

SEQ ID NO: 594 - DNA, 2212 bp, Artificial Sequence
  Description of Artificial Sequence: Synthetic polynucleotide
  misc_feature (1283)..(1283): n is a, c, g, or t
atggctgctgacggttatcttccagattggctcgaggacaacctttctgaaggcattcgtgagtggtgggctctgaaacctggagtccctcaacccaaagcgaaccaacaacaccaggacaaccgtcggggtcttgtgcttccgggttacaaatacctcggaccgggtaacggactcgacaaaggagagccggtcaacgaggcggacgcggcagccctcgaacacgacaaagcttacgaccagcagctcaaggccggtgacaacccgtacctcaagtacaaccacgccgacgccgagtttcaggagcgtcttcaagaagatacgtcttttgggggcaaccttggcagagcagtcttccaggccaaaaagaggatccttgagcctcttggtctggttgagggagcagctaaaacggctcctggaaagaagaggcctgtagatcagtctcctcaggaaccggactcatcatctggtgttggcaaatcgggcaaacagcctgccagaaaaagactaaatttcggtcagactggcgactcagagtcagtcccagaccctcaacctctcggagaaccaccagcagcccccacaagtttgggatctaatacaatggcttcaggcggtggcgcaccaatggcagacaataacgagggtgccgatggagtgggtaattcctcaggaaattggcattgcgattcccaatggctgggcgacagagtcatcaccaccagcaccagaacctgggccctgcccacttacaacagccatctctacaagcaaatctccagccaatcaggagcttcaaacgacaaccactactttggctacagcaccccttgggggtattttgactttaacagattccactgccacttctcaccacgtgactggcagcgactcattaacaacaactggggattccggcccaagaaactcagcttcaagctcttcaacatccaagttaaagaggtcacgcagaacgatggcacgacgactattgccaataaccttaccagcacggtccaagtgtttacggactcggagtatcagctcccgtacgtgctcgggtcggcgcaccaaggctgtctcccgccgtttccagcggacgccttcatggtccctcagtatggatacctcaccctgaacaacggaagtcaagcggtgggacgctcatccttttactgcctggagtacttcccttcgcagatgctaaggactggaaataacttccaattcagctataccttcgaggatgtaccttttcacggcagctacgctcacagccngagtttggatcgcttgatgaatcctcttattgatcagtatctgtactacctgaacagaacgcaaggaacaacctctggaacaaccaaccaatcacggctgctttttagccaggctgggcctcagtctatgtctttgcaggccagaaattggctacctgggccctgctaccggcaacagagacttttcaaagactgctaacgacaacaacaacagtaactttccttggacagcggccagcaaatatcatctcaatggccgcgactcgctggtgaatccaggaccagctatggccagtcacaaggacgatgaagaaaaatttttccctatgcacggcaatctaatatttggcaaagaagggacaacggcaagtaacgcagaattagataatgtaatgattacggatgaagaagagattcgtaccaccaatcctgtggcaacagagcagtatggaactgtggcaaataacttgcagagctcaaatacagctcccacgactagaactgtcaatgatcagggggccttacctggcatggtgtggcaagatcgtgacgtgtaccttcaaggacctatctgggcaaagattcctcacacggatggacactttcatccttctcctctgatgggaggctttggactgaaacatccgcctcctcaaatcatgatcaaaaatactccggtaccggcaaatcctccgacgactttcagcccggccaagtttgcttcatttatcactcagtactccactggacaggtcagcgtggaaattgagtgggagctacagaaagaaaacagcaaacgttggaatccagagattcagtacacttccaactacaacaagtctgttaatgtggactttactgtagacactaatggtgtttatagtgaacctcgccctattggaacccggtatctcacacgaaactcgtaa

SEQ ID NO: 595 - protein, 736 aa, Artificial Sequence
  Description of Artificial Sequence: Synthetic polypeptide
MAADGYLPDWLEDNLSEGIREWWALKPGVPQPKANQQHQDNRRGLVLPGYKYLGPGNGLDKGEPVNEADAAALEHDKAYDQQLKAGDNPYLKYNHADAEFQERLQEDTSFGGNLGRAVFQAKKRILEPLGLVEGAAKTAPGKKRPVDQSPQEPDSSSGVGKSGKQPARKRLNFGQTGDSESVPDPQPLGEPPAAPTSLGSNTMASGGGAPMADNNEGADGVGNSSGNWHCDSQWLGDRVITTSTRTWALPTYNSHLYKQISSQSGASNDNHYFGYSTPWGYFDFNRFHCHFSPRDWQRLINNNWGFRPKKLSFKLFNIQVKEVTQNDGTTTIANNLTSTVQVFTDSEYQLPYVLGSAHQGCLPPFPADAFMVPQYGYLTLNNGSQAVGRSSFYCLEYFPSQMLRTGNNFQFSYTFEDVPFHGSYAHSQSLDRLMNPLIDQYLYYLNRTQGTTSGTTNQSRLLFSQAGPQSMSLQARNWLPGPCYRQQRLSKTANDNNNSNFPWTAASKYHLNGRDSLVNPGPAMASHKDDEEKFFPMHGNLIFGKEGTTASNAELDNVMITDEEEIRTTNPVATEQYGTVANNLQSSNTAPTTRTVNDQGALPGMVWQDRDVYLQGPIWAKIPHTDGHFHPSPLMGGFGLKHPPPQIMIKNTPVPANPPTTFSPAKFASFITQYSTGQVSVEIEWELQKENSKRWNPEIQYTSNYNKSVNVDFTVDTNGVYSEPRPIGTRYLTRNS

SEQ ID NO: 596 - DNA, 2211 bp, Artificial Sequence
  Description of Artificial Sequence: Synthetic polynucleotide
atggctgctgacggttatcttccagattggctcgaggacaacctttctgaaggcattcgtgagtggtgggctctgaaacctggagtccctcaacccaaagcgaaccaacaacaccaggacaaccgtcggggtcttgtgcttccgggttacaaatacctcggacccggtaacggactcgacaaaggagagccggtcaacgaggcggacgcggcagccctcgaacacgacaaagcttacgaccagcagctcaaggccggtgacaacccgtacctcaagtacaaccacgccgacgccgagtttcaggagcgtcttcaagaagatacgtcttttgggggcaaccttggcagagcagtcttccaggccaaaaagaggatccttgagcctcttggtctggttgagggagcagctaaaacggctcctggaaagaagaggcctgtagatcagtctcctcaggaaccggactcatcatctggtgttggcaaatcgggcaaacagcctgccagaaaaagactaaatttcggtcagactggcgactcagagtcagtcccagaccctcaacctctcggagaaccaccagcagcccccacaagtttgggatctaatacaatggcttcaggcggtggcgcaccaatggcagacaataacgagggtgccgatggagtgggtaattcctcaggaaattggcattgcgattcccaatggctgggcgacagagtcatcaccaccagcaccagaacctgggccctgcccacttacaacagccatctctacaagcaaatctccagccaatcaggagcttcaaacgacaaccactactttggctacagcaccccttggggtattttgactttaacagattccactgccacttctcaccacgtgactggcagcgactcattaacaacaactggggattccggcccaagaaactcagcttcaagctcttcaacatccaagttaaagaggtcacgcagaacgatggcacgacgactattgccaataaccttaccagcacggttcaagtgtttacggactcggagtatcagctcccgtacgtgctcgggtcggcgcaccaaggctgtctcccgccgtttccagcggacgccttcatggtccctcagtatggatacctcaccctgaacaacggaagtcaagcggtgggacgctcatccttttactgcctggagtacttcccttcgcagatgctaaggactggaaataacttccaattcagctataccctcgaggatgtaccttttcacagcagctacgctcacagccagagtttggatcgcttgatgaatcctcttattgatcagtatctgtactacctgaacagaacgcaaggaacaacctctggaacaaccaaccaatcacggctgctttttagccaggctgggcctcagtctatgtctttgcaggccagaaattggctacctgggccctgctaccggcaacagagactttcaaagactgctaacgacaacaacaacagtaactttccttggacagcggccagcaaatatcatctcaatggccgcgactcgctggtgaatccaggaccagctatggccagtcacaaaggacgatgaagaaaaatttttccctatgcacggcaatctaatatttggcaaagaagggacaacggcaagtaacgcagaattagatagtgtaatgattacggatgaagaagagattcgtaccaccaatcctgtggcaacagagcagtatggaactgtggcaaataacttgcagagctcaaatacagctcccacgactagaactgtcaatgatcagggggccttacctggcatggtgtggcaagatcgtgacgtgtaccttcaaggacctatctgggcaaagattcctcacacggatggacactttcatccttctcctctgatgggaggctttggactgaaacatccgcctcctcaaatcatgatcaaaaatactccggtaccggcaaatcctccgacgactttcagcccggccaagtttgcttcatttatcactcagtactccactggacaggtcagcgtggaaattgagtgggagctacagaaagaaaacagcaaacgttggaatccagagattcagtacacttccaactacaacaagtctgttaatgtggactttactgtagacactaatggtgtttatagtgaacctcgccctattggaacccggtatctcacacgaaacttgtaa

SEQ ID NO: 597 - protein, 668 aa, Artificial Sequence
  Description of Artificial Sequence: Synthetic polypeptide
MAADGYLPDWLEDNLSEGIREWWALKPGVPQPKANQQHQDNRRGLVLPGYKYLGPGNGLDKGEPVNEADAAALEHDKAYDQQLKAGDNPYLKYNHADAEFQERLQEDTSFGGNLGRAVFQAKKRILEPLGLVEGAAKTAPGKKRPVDQSPQEPDSSSGVGKSGKQPARKRLNFGQTGDSESVPDPQPLGEPPAAPTSLGSNTMASGGGAPMADNNEGADGVGNSSGNWHCDSQWLGDRVITTSTRTWALPTYNSHLYKQISSQSGASNDNHYFGYSTPWGILTLTDSTATSHHVTGSDSLTTTGDSGPRNSASSSSTSKLKRSRRTMARRLLPITLPARFKCLRTRSISSRTCSGRRTKAVSRRFQRTPSWSLSMDTSPTTEVKRWDAHPFTAWSTSLRRCGLEITSNSAIPSRMYLFTAATLTARVWIAILLLISICTTTERKEQPLEQPTNHGCFLARLGLSLCLCRPEIGYLGPATGNRDFQRLLTTTTTVTFLGQRPANIISMAATRWIQDQLWPVTRTMKKNFSLCTAIRGPYLAWCGKIVTCTFKDLSGQRFLTRMDTFILLLWEALDNIRLLKSSKILRYRQILRRLSARPSLLHLSLSTPLDRSAWKLSGSYRKKTANVGIQRFSTLPTTTSLLMWTLLTLMVFIVNLALLEPGISHETC

SEQ ID NO: 598 - DNA, 2212 bp, Artificial Sequence
  Description of Artificial Sequence: Synthetic polynucleotide
atggctgctgacggttatcttccagattggctcgaggacaacctttctgaaggcattcgtgagtggtgggctctgaaacctggagtccctcaacccaaagcgaaccaacaacaccaggacaaccgtcggggtcttgtgcttccgggttacaaatacctcggacccggtaacggactcgacaaaggagagccggtcaacgaggcggacgcggcagccctcgaacacgacaaagcttacgaccagcagctcaaggccggtgacaacccgtacctcaagtacaaccacgccgacgccgagtttcaggagcgtcttcaagaagatacgtcttttgggggcaaccttggcagagcagtcttccaggccaaaaagaggatccttgagcctcttggtctggttgagggagcagctaaaacggctcctggaaagaagaggcctgtagatcagtctcctcaggaaccggactcatcatctggtgttggcaaatcgggcaaacagcttgccagaaaaagactaaatttcggtcagactggcgactcagagtcagtcccagaccctcaacctctcggagaaccaccagcagcccccacaagtttgggatctaatacaatggcttcaggcggtggcgcaccaatggcagacaataacgagggtgccgatggagtgggtaattcctcaggaaattggcattgcgattcccaatggctgggcgacagagtcatcaccaccagcaccagaacctgggccctgcccacttacaacagccatctctacaagcaaatctccggccaatcaggagcttcaaacgacaaccactactttggctacagcaccccctgggggtattttgactttaacagattccactgccacttctcaccacgtgactggcagcgactcattaacaacaactggggattccggcccaagaaactcagcttcaagctcttcaacatccaagttaaagaggtcacgcagaacgatggcacgacgactattgccaataaccttaccagcacggttcaagtgtttacggactcggagtatcagctcccgtacgtgctcgggtcggcgcaccaaggctgtctcccgccgtttccagcggacgtcttcatggtccctcagtatggatacctcaccctgaacaacggaagtcaagcggtgggacgctcatccttttactgcctggagtacttcccttcgcagatgctaaggactggaaataacttccaattcagctataccttcgaggatgtaccttttcacagcagctacgctcacagccagagtttggatcgcttgatgaatcctcttattgatcagtatctgtactacctgaacagaacgcaaggaacaacctctggaacaaccaaccaatcacggctgctttttagccaggctgggcctcagtctatgtctttgcaggccagaaattggctacctgggccctgctaccggcaacagagactttcaaagactgctaacgacaacaacaacagtaactttccttggacagcggccagcaaatatcatctcaatggccgcgactcgctggtgaatcccaggaccagctatggccagtcacaaggacgatgaagaaaaatttttccctatgcacggcaatctaatatttggcaaagaagggacaacggcaagtaacgcagaattagataatgtaatgattacggatgaagaagagattcgtaccaccaatcctgtggcaacagagcagtatggaactgtggcaaataacttgcagagctcaaatacagctcccacgactagaactgtcaatgatcagggggccttacctggcatggtgtggcaagatcgtgacgtgtaccttcaaggacctatctgggcaaagattcctcacacggatggacactttcatccttctcctctgatgggaggctttggactgaaacatccgcctcctcaaatcatgatcaaaaatactccggtaccggcaaatcctccgacgactttcagcccggccaagtttgcttcatttatcactcagtactccactggacaggtcagcgtggaaattgagtgggagctacagaaagaaaacagcaaacgttggaatccagagattcagtacacttccaactacaacaagtctgttaatgtggactttactgtagacactaatggtgtttatagtgaacctcgccctattggaacccggtatctcacacgaaacttgtaa

SEQ ID NO: 599 - protein, 736 aa, Artificial Sequence
  Description of Artificial Sequence: Synthetic polypeptide
MAADGYLPDWLEDNLSEGIREWWALKPGVPQPKANQQHQDNRRGLVLPGYKYLGPGNGLDKGEPVNEADAAALEHDKAYDQQLKAGDNPYLKYNHADAEFQERLQEDTSFGGNLGRAVFQAKKRILEPLGLVEGAAKTAPGKKRPVDQSPQEPDSSSGVGKSGKQLARKRLNFGQTGDSESVPDPQPLGEPPAAPTSLGSNTMASGGGAPMADNNEGADGVGNSSGNWHCDSQWLGDRVITTSTRTWALPTYNSHLYKQISGQSGASNDNHYFGYSTPWGYFDFNRFHCHFSPRDWQRLINNNWGFRPKKLSFKLFNIQVKEVTQNDGTTTIANNLTSTVQVFTDSEYQLPYVLGSAHQGCLPPFPADVFMVPQYGYLTLNNGSQAVGRSSFYCLEYFPSQMLRTGNNFQFSYTFEDVPFHSSYAHSQSLDRLMNPLIDQYLYYLNRTQGTTSGTTNQSRLLFSQAGPQSMSLQARNWLPGPCYRQQRLSKTANDNNNSNFPWTAASKYHLNGRDSLVNPGPAMASHKDDEEKFFPMHGNLIFGKEGTTASNAELDNVMITDEEEIRTTNPVATEQYGTVANNLQSSNTAPTTRTVNDQGALPGMVWQDRDVYLQGPIWAKIPHTDGHFHPSPLMGGFGLKHPPPQIMIKNTPVPANPPTTFSPAKFASFITQYSTGQVSVEIEWELQKENSKRWNPEIQYTSNYNKSVNVDFTVDTNGVYSEPRPIGTRYLTRNL

SEQ ID NO: 600 - DNA, 2212 bp, Artificial Sequence
  Description of Artificial Sequence: Synthetic polynucleotide
atggctgctgacggttatcttccagattggctcgaggacaacctttctgaaggcattcgtgagtggtgggctctgaaacctggagtccctcaacccaaagcgaaccaacaacaccaggacgaccgtcggggtcttgtgcttccgggttacaaatacctcggacccggtaacggactcgacaaaggagagccggtcaacgaggcggacgcggcagccctcgaacacgacaaagcttacgaccagcagctcaaggccggtgacaacccgtgcctcaagtacaaccacgccgacgccgagtttcaggagcgtcttcaagaagatacgtcttttgggggcaaccttggcagagcagtcttccaggccaaaaagaggatccttgagcctcttggtctggttgaggaagcagctaaaacggctcctggaaagaagaggcctgtagatcagtctcctcaggaaccggactcatcatctggtgttggcaaatcgggcaaacagcctgccagaaaaagactaaatttcggtcagactggcgactcagagtcagtcccagaccctcaacctctcggagaaccaccagcagcccccacaagtttgggatctaatacaatggcttcaggcggtagcgcaccaatggcagacaataacgagggtgccgatggagtgggtaattcctcaggaaattggcattgcgattcccaatggctgggcgacagagtcatcaccaccagcaccagaacctgggccctgcccacttacaacaaccatctctacaagcaaatctccagccaatcaggagcttcaaacgacaaccactactttggctacagcaccccttgggggtattttgactttaacagattccactgccacttctcaccacgtgactggcagcgactcattaacaacaactggggattccggcccaagaaactcagcttcaagctcttcaacatccaagttaaagaggtcacgcagaacgatggcacgacgactattgccaataaccttaccagcacggttcaagtgtttacggactcggagtatcagctcccgtacgtgctcgggtcggcgcaccaaggctgtctcccgccgtttccagcggacgtcttcatggtccctcagtatggatacctcaccctgaacaacggaagtcaagcggtgggacgctcatccttttactgcctggagtacttcccttcgcagatgctaaggactggaaataacttccaattcagctataccttcgaggatgtaccttttcacagcagctacgctcacagccagagtttggatcgcttgatggatcctcttattgatcagtatctgtactacctgaacagaacgcaaggaacaacctctggaacaaccaaccaatcacggctgctttttagccaggctgggcctcagtctatgtctttgcaggccagaaattggctacctgggccctgctaccggcaacagagactttcaaagactgctaacgacaacaacaacagtaactttccttggacagcggccagcaaatatcatctcaatggccgcgactcgctggtgaatccaggaccagctatggccagtcacaaaggacgatgaagaaaaatttttccctatgcacggcaatctaatatttggcaaagaagggacaacggcaagtaacgcagaattagataatgtaatgattacggatgaagaagagattcgtaccaccaatcctgtggcaacagagcagtatggaactgtggcaaataacttgcagagctcaaatacagctcccacgactagaactgtcaatgatcagggggccttacctggcatggtgtggcaagatcgtgacgtgtaccttcaaggacctatctgggcaaagattcctcacacggatggacactttcatccttctcctctgatgggaggctttggactgaaacatccgcctcctcaaatcatgatcaaaaatactccggtaccggcaaatcctccgacgactttcagcccggccaagtttgcttcatttatcactcagtactccactggacaggtcagcgtggaaattgagtgggagctacagaaagaaaacagcaaacgttggaatccagagattcagtacacttccaactacaacaagtctgttaatgtggactttactgtagacactaatggtgtttatagtgaacctcgccctattggaacccggtatctcacacgaaacctgtaa

SEQ ID NO: 601 - protein, 736 aa, Artificial Sequence
  Description of Artificial Sequence: Synthetic polypeptide
MAADGYLPDWLEDNLSEGIREWWALKPGVPQPKANQQHQDDRRGLVLPGYKYLGPGNGLDKGEPVNEADAAALEHDKAYDQQLKAGDNPCLKYNHADAEFQERLQEDTSFGGNLGRAVFQAKKRILEPLGLVEEAAKTAPGKKRPVDQSPQEPDSSSGVGKSGKQPARKRLNFGQTGDSESVPDPQPLGEPPAAPTSLGSNTMASGGSAPMADNNEGADGVGNSSGNWHCDSQWLGDRVITTSTRTWALPTYNNHLYKQISSQSGASNDNHYFGYSTPWGYFDFNRFHCHFSPRDWQRLINNNWGFRPKKLSFKLFNIQVKEVTQNDGTTTIANNLTSTVQVFTDSEYQLPYVLGSAHQGCLPPFPADVFMVPQYGYLTLNNGSQAVGRSSFYCLEYFPSQMLRTGNNFQFSYTFEDVPFHSSYAHSQSLDRLMDPLIDQYLYYLNRTQGTTSGTTNQSRLLFSQAGPQSMSLQARNWLPGPCYRQQRLSKTANDNNNSNFPWTAASKYHLNGRDSLVNPGPAMASHKDDEEKFFPMHGNLIFGKEGTTASNAELDNVMITDEEEIRTTNPVATEQYGTVANNLQSSNTAPTTRTVNDQGALPGMVWQDRDVYLQGPIWAKIPHTDGHFHPSPLMGGFGLKHPPPQIMIKNTPVPANPPTTFSPAKFASFITQYSTGQVSVEIEWELQKENSKRWNPEIQYTSNYNKSVNVDFTVDTNGVYSEPRPIGTRYLTRNL

SEQ ID NO: 602 - DNA, 2211 bp, Artificial Sequence
  Description of Artificial Sequence: Synthetic polynucleotide
atggctgctgacggttatcttccagattggctcgaggacaacctttctgaaggcattcgtgagtggtgggctctgaaacctggagtccctcaacccaaagcgaaccaacaacaccaggacgaccgtcggggtcttgtgcttccgggttacaaatacctcggacccggtaacggactcgacaaaggagagccggtcaacgaggcggacgcggcagccctcgaacacgacaaagcttacgaccagcagctcaaggccggtgacaacccgtacctcaagtacaaccacgccgacgccgagtttcaggagcgtcttcaagaagatacgtcttttgggggcaaccttggcagagcagtcttccaggccaaaaagaggatccttgagcctcttggtctggttgaggaagcagctaaaacggctcctggaaagaagaggcctgtagatcagtctcctcaggaaccggactcatcatctggtgttggcaaatcgggcaaacagcctgccagaaaaagactaaatttcggtcagactggcgactcagagtcagtcccagaccctcaacctctcggagaaccaccagcagcccccacaagtttgggatctaatacaatggcttcaggcggtggcgcaccaatggcagacaataacgagggtgccgatggagtgggtaattcctcaggaaattggcattgcgattcccaatggctgggcaacagagtcatcaccaccagcaccagaacctgggccctgcccacttacaacaaccatctctacaagcaaatctccagccaatcaggagcttcaaacgacaaccactactttggctacagcaccccttgggggtattttgactttaacagattccactgccacttctcaccacgtgactggcagcgactcattaacaacaactggggattccggcccaagaaactcagcttcaagctcttcaacatccaagttaaagaggtcacgcagaacgatggcacgacgactattgccaataaccttaccagcacggttcaagtgtttacggactcggagtatcagctcccgtacgtgctcgggtcggcgcaccaaggctgtctcccgccgtttccagcggacgtcttcatggtccctcagtatggatacctcaccctgaacaacggaagtcaagcggtgggacgctcatccttttactgcctggagtacttcccttcgcagatgctaaggactggaaataacttccaattcagctataccttcgaggatgtaccttttcacagcagctacgctcacagccagagtttggatcgcttgatgaatcctcttattgatcagtatctgtactacctgaacagaacgcaaggaacaacctctggaacaaccaaccaatcacggctgctttttagccaggctgggcctcagtctatgtctttgcaggccagaaattggctacctgggccctgctaccggcaacagagactttcaaagactgctaacgacaacaacaacagtaactttccttggacagcggccagcaaatatcatctcaatggccgcgactcgctggtgaatccaggaccagctatggccagtcacaaggacgatgaagaaaaatttttccctatgcacggcaatctaatatttggcaaagaagggacaacggcaagtaacgcagaattagataatgtaatgattacggatgaagaagagattcgtaccaccaatcctgtggcaacagagcagtatggaactgtggcaaataacttgcagagctcaaatacagctcccacgactagaactgtcaatgatcagggggccttacctggcatggtgtggcaagatcgtgacgtgtaccttcaaggacctatctgggcaaagattcctcacacggatggacactttcatccttctcctctgatgggaggctttggactgaaacatccgcctcctcaaatcatgatcaaaaatactccggtaccggcaaatcctccgacgactttcagcccggccaagtttgcttcatttatcactcagtactccactggacaggtcagcgtggaaattgagtgggagctacagaaagaaaacagcaaacgttggaatccagagattcagtacacttccaactacaacaagtctgttaatgtggactttactgtagacactaatggtgtttatagtgaacctcgccctattggaacccggtatctcacacgaaacttgtaa

SEQ ID NO: 603 - protein, 736 aa, Artificial Sequence
  Description of Artificial Sequence: Synthetic polypeptide
MAADGYLPDWLEDNLSEGIREWWALKPGVPQPKANQQHQDDRRGLVLPGYKYLGPGNGLDKGEPVNEADAAALEHDKAYDQQLKAGDNPYLKYNHADAEFQERLQEDTSFGGNLGRAVFQAKKRILEPLGLVEEAAKTAPGKKRPVDQSPQEPDSSSGVGKSGKQPARKRLNFGQTGDSESVPDPQPLGEPPAAPTSLGSNTMASGGGAPMADNNEGADGVGNSSGNWHCDSQWLGNRVITTSTRTWALPTYNNHLYKQISSQSGASNDNHYFGYSTPWGYFDFNRFHCHFSPRDWQRLINNNWGFRPKKLSFKLFNIQVKEVTQNDGTTTIANNLTSTVQVFTDSEYQLPYVLGSAHQGCLPPFPADVFMVPQYGYLTLNNGSQAVGRSSFYCLEYFPSQMLRTGNNFQFSYTFEDVPFHSSYAHSQSLDRLMNPLIDQYLYYLNRTQGTTSGTTNQSRLLFSQAGPQSMSLQARNWLPGPCYRQQRLSKTANDNNNSNFPWTAASKYHLNGRDSLVNPGPAMASHKDDEEKFFPMHGNLIFGKEGTTASNAELDNVMITDEEEIRTTNPVATEQYGTVANNLQSSNTAPTTRTVNDQGALPGMVWQDRDVYLQGPIWAKIPHTDGHFHPSPLMGGFGLKHPPPQIMIKNTPVPANPPTTFSPAKFASFITQYSTGQVSVEIEWELQKENSKRWNPEIQYTSNYNKSVNVDFTVDTNGVYSEPRPIGTRYLTRNL

SEQ ID NO: 604 - DNA, 2211 bp, Artificial Sequence
  Description of Artificial Sequence: Synthetic polynucleotide
atggctgctgacggttatcttccagattggctcgaggacaacctttctgaaggcattcgtgagtggtgggctctgaaacctggagtccctcaacccaaagcgaaccaacaacaccaggacgaccgtcggggtcttgtgcttccgggttacaaatacctcggacccggtaacggactcgacaaaggagagccggtcaacgaggcggacgcggcagccctcgaacacgacaaagcttacgaccagcagctcaaggccggtgacaacccgtacctcaagtacaaccacgccgacgccgagtttcaggagcgtcttcaagaagatacgtcttttgggggcaaccttggcagagcagtcttccaggccaaaaagaggatccttgagcctcttggtctggttgaggaagcagctaaaacggctcctggaaagaagaggcctgtagatcagtctcctcaggaaccggactcatcatctggtgttggcaaatcgggcaaacagcctgccagaaaaagactaaatttcggtcagactggcgactcagagtcagtcccagaccctcaacctctcggagaaccaccagcagcccccacaagtttgggatctaatacaatggcttcaggcggtggcgcaccaatggcggacaataacgagggtgccgatggagtgggtaattcctcaggaaattggcattgcgattcccaatggctgggcgacagagtcatcaccaccagcaccagaacctgggccctgcccacttacaacaaccatctctacaagcaaatctccagccaatcaggagcttcaaacgacaaccactactttggctacagcaccccttgggggtattttgactttaacagattccactgccacttctcaccacgtgactggcagcgactcattaacaacaactggggattccggcccaagaaactcagcttcaagctcttcaacatccaagttaaagaggtcacgcagaacgatggcacgacgactattgccaataaccttaccagcacggttcaagtgtttacggactcggagtatcagctcccgtacgtgctcgggtcggcgcaccaaggctgtctcccgccgtttccagcggacgtcttcatggtccctcagtatggatacctcaccctgaacaacggaagtcaagcggtgggacgctcatccttttactgcctggagtacttcccttcgcagatgctaaggactggaaataacttccaattcagctataccttcgaggatgtaccttttcacagcagctacgctcacagccagagtttggatcgcttgatgaatcctcttattgatcagtatctgtactacctgaacagaacgcaaggaacaacctctggaacaaccaaccaatcacggctgctttttagccaggctgggcctcagtctatgtctttgcaggccagaaattggctacctgggccctgctaccggcaacagagactttcaaagactgctaacgacaacaacaacagtaactttccttggacagcggccagcaaatatcatctcaatggccgcgactcgctggtgaatccaggaccagctatggccagtcacaaggacgatgaagaaaaatttttccctatgcacggcaatctaatatttggcaaagaagggacaacggcaagtaacgcagaattagataatgtaatgattacggatgaagaagagattcgtaccaccaatcctgtggcaacagtgcagtatggaactgtggcaaataacttgcagagctcaaatacagctcccacgactagaactgtcaatgatcagggggccttacctggcatggtgtggcaagatcgtgacgtgtaccttcaaggacctatctgggcaaagattcctcacacggatggacactttcatccttctcctctgatgggaggctttggactgaaacatccgcctcctcaaatcatgatcaaaaatactccggtaccggcaaatcctccgacgactttcagcccggccaagtttgcttcatttatcactcagtactccactggacaggtcagcgtggaaattgagtgggagctacagaaagaaaacagcaaacgttggaatccagagattcagtacacttccaactacaacaagtctgttaatgtggactttactgtagacactaatggtgtttatagtgaacctcgccctattggaacccggtatctcacacgaaacttgtaa

SEQ ID NO: 605 - protein, 736 aa, Artificial Sequence
  Description of Artificial Sequence: Synthetic polypeptide
MAADGYLPDWLEDNLSEGIREWWALKPGVPQPKANQQHQDDRRGLVLPGYKYLGPGNGLDKGEPVNEADAAALEHDKAYDQQLKAGDNPYLKYNHADAEFQERLQEDTSFGGNLGRAVFQAKKRILEPLGLVEEAAKTAPGKKRPVDQSPQEPDSSSGVGKSGKQPARKRLNFGQTGDSESVPDPQPLGEPPAAPTSLGSNTMASGGGAPMADNNEGADGVGNSSGNWHCDSQWLGDRVITTSTRTWALPTYNNHLYKQISSQSGASNDNHYFGYSTPWGYFDFNRFHCHFSPRDWQRLINNNWGFRPKKLSFKLFNIQVKEVTQNDGTTTIANNLTSTVQVFTDSEYQLPYVLGSAHQGCLPPFPADVFMVPQYGYLTLNNGSQAVGRSSFYCLEYFPSQMLRTGNNFQFSYTFEDVPFHSSYAHSQSLDRLMNPLIDQYLYYLNRTQGTTSGTTNQSRLLFSQAGPQSMSLQARNWLPGPCYRQQRLSKTANDNNNSNFPWTAASKYHLNGRDSLVNPGPAMASHKDDEEKFFPMHGNLIFGKEGTTASNAELDNVMITDEEEIRTTNPVATVQYGTVANNLQSSNTAPTTRTVNDQGALPGMVWQDRDVYLQGPIWAKIPHTDGHFHPSPLMGGFGLKHPPPQIMIKNTPVPANPPTTFSPAKFASFITQYSTGQVSVEIEWELQKENSKRWNPEIQYTSNYNKSVNVDFTVDTNGVYSEPRPIGTRYLTRNL

SEQ ID NO: 606 - DNA, 2211 bp, Artificial Sequence
  Description of Artificial Sequence: Synthetic polynucleotide
atggctgctgacggttatcttccagattggctcgaggacaacctttctgaaggcattcgtgagtggtgggctctgaaacctggagtccctcaacccaaagcgaaccaacaacaccaggacaaccgtcggggtcttgtgcttccgggttacaaatacctcggacccggtaacggactcgacaaaggagagccggtcaacgaggcggacgcggcagccctcgaacacgacaaagcttacgaccagcagctcaaggccggtgacaacccgtacctcaagtacaaccacgccgacgccgagtttcaggagcgtcttcaagaagatacgtcttttgggggcaaccttggcagagcagtcttccaggccaaaaaggggatccttgagcctcttggtctggttgaggaagcagctaaaacggctcctggaaagaagaggcctgtagatcagtctcctcaggaaccggactcatcatctggtgttggcaaatcgggcaaacagcctgccagaaaaagactaaatttcggtcagactggcgactcagagtcagtcccagaccctcaacctctcggagaaccaccagcagcccccacaagtttgggatctaatacaatggcttcaggcggtggcgcaccaatggcagacaataacgagggtgccgatggagtgggtaattcctcaggaaattggcattgcgattcccaatggctgggcgacagagtcatcaccaccagcaccagaacctgggccctgcccacttacaacaaccatctctacaagcaaatctccagccaatcaggagcttcaaacgacaaccactactttggctacagcaccccttgggggtattttgactttaacagattccactgccacttctcaccacgtgactggcagcgactcattaacaacaactggggattccggcccaagaaactcagcttcaagctcttcaacatccaagttaaagaggtcacgcagaacgatggcacgacgactattgccaataaccttaccagcacggttcaagtgtttacggactcggagtatcagctcccgtacgtgttcgggtcggcgcaccaaggctgtctcccgccgtttccagcggacgtcttcatggtccctcagtatggatacctcaccctgaacaacggaagtcaagcggtgggacgctcatccttttactgcctggagtacttcccttcgcagatgctaaggactggaaataacttccaattcagctataccttcgaggatgtaccttttcacagcagctacgctcacagccagagttcggatcgcttgatgaatcctcttattgatcagtatctgtactacctgaacagaacgcaaggaacaacctctggaacaaccaaccaatcacggctgctttttagccaggctgggcctcagtctatgtctttgcaggccagaaattggctacctgggccctgctaccggcaacagagactttcaaagactgctaacgacaacaacaacagtaactttccttgaacagcggccagcaaatatcatctcaatggccgcgactcgctggtgaatccaggaccagctatggccagtcacaaggacgatgaagaaaaatttttccctatgcacggcaatctaatatttggcaaagaagggacaacggcaagtaacgcagaattagataatgtaatgattacggatgaagaagagattcgtaccaccaatcctgtggcaacagagcagtatggaactgtggcaaataacttgcagagctcaaatacagctcccacgactagaactgtcaatgatcagggggccttacctggcatggtgtggcaagatcgtgacgtgtaccttcaaggacctatctgggcaaagattcctcacacggatggacactttcatccttctcctctgatgggaggctttggactgaaacatccgcctcctcaaatcatgatcaaaaatactccggtaccggcaaatcctccgacgactttcagcccggccaagtttgcttcatttatcactcagtactccactggacaggtcagcgtggaaattgagtgggagctacagaaagaaaacagcaaacgttggaatccagagattcagtacacttccaactacaacaagtctgttaatgtggactttactgtagacactaatggtgtttatagtgaacctcgccctattggaacccggtatctcacacgaaacttgtaa

SEQ ID NO: 607 - protein, 735 aa, Artificial Sequence
  Description of Artificial Sequence: Synthetic polypeptide
MAADGYLPDWLEDNLSEGIREWWALKPGVPQPKANQQHQDNRRGLVLPGYKYLGPGNGLDKGEPVNEADAAALEHDKAYDQQLKAGDNPYLKYNHADAEFQERLQEDTSFGGNLGRAVFQAKKGILEPLGLVEEAAKTAPGKKRPVDQSPQEPDSSSGVGKSGKQPARKRLNFGQTGDSESVPDPQPLGEPPAAPTSLGSNTMASGGGAPMADNNEGADGVGNSSGNWHCDSQWLGDRVITTSTRTWALPTYNNHLYKQISSQSGASNDNHYFGYSTPWGYFDFNRFHCHFSPRDWQRLINNNWGFRPKKLSFKLFNIQVKEVTQNDGTTTIANNLTSTVQVFTDSEYQLPYVFGSAHQGCLPPFPADVFMVPQYGYLTLNNGSQAVGRSSFYCLEYFPSQMLRTGNNFQFSYTFEDVPFHSSYAHSQSSDRLMNPLIDQYLYYLNRTQGTTSGTTNQSRLLFSQAGPQSMSLQARNWLPGPCYRQQRLSKTANDNNNSNFPTAASKYHLNGRDSLVNPGPAMASHKDDEEKFFPMHGNLIFGKEGTTASNAELDNVMITDEEEIRTTNPVATEQYGTVANNLQSSNTAPTTRTVNDQGALPGMVWQDRDVYLQGPIWAKIPHTDGHFHPSPLMGGFGLKHPPPQIMIKNTPVPANPPTTFSPAKFASFITQYSTGQVSVEIEWELQKENSKRWNPEIQYTSNYNKSVNVDFTVDTNGVYSEPRPIGTRYLTRNL

SEQ ID NO: 608 - DNA, 2211 bp, Artificial Sequence
  Description of Artificial Sequence: Synthetic polynucleotide
atggctgctgacggttatcttccagattggctcgaggacaacctttctgaaggcattcgtgagtggtgggctctgaaacctggagtccctcaacccaaagcgaaccaacaacaccaggacaaccgtcggggtcttgtgcttccgggttacaaatacctcggacccggtaacggactcgacgaaggagagccggtcaacgaggcggacgcggcagccctcgaacacgacaaagcttacgaccagcagctcaaggccggtgacaacccgtacctcaagtacaaccacgccgacgccgagtttcaggagcgtcttcaagaagatacgtcttttgggggcaaccttggcagagcagtcttccaggccaaaaagaggatccttgagcctcttggtctggttgagggagcagctaaaacggctcctggaaagaagaggcctgtagatcagtctcctcaggaaccggactcatcatctggtgttggcaaatcgggcaaacagcctgccagaaaaagactaaatttcggtcagactggcgactcagagtcagtcccagaccctcaacctctcggagaaccaccagcagcccccacaagtttgggatctaatacaatggcttcaggcggtggcgcaccaatggcagacaataacgagggtgccgatggagtgggtaattcctcaggaaattggcattgcgattcccaatggctgggcgacagagtcatcaccaccagcaccagaacctgggccctgcccacttacaacagccacctctacaagcaaatctccagccaatcaggagcttcaaacgacaaccactactttggctacagcaccccttgggggtattttgactttaacagattccactgccacttctcaccacgtgactggcagcgactcattaacaacaactggggattccggcccaagaaactcagcttcaagctcttcaacatccaagttaaagaggtcacgcagaacgatggcacgacgactattgccaataaccttaccagcacggttcaagtgtttacggactcggagtatcagctcccgtacgtgctcgggtcggcgcaccaaggctgtctcccgccgtttccagcggacgtcttcatggtccctcagtatggatacctcaccctgaacaacggaagtcaagcggtgggacgctcatccttttactgcctggagtacttcccttcgcagatgctaaggactggaaataacttccaattcagctataccttcgaggatgtaccttttcacagcagctacgctcacagccagagtttggatcgcttgatgaatcctcttattgatcagtatctgtactacctgaacagaacgcaaggaacaacctctggaacaaccaaccaatcacggctgctttttagccaggctgggcctcagtctatgtctttgcaggccagaaattggctacctgggccctgctaccggcaacagagactttcaaagactgctaacgacaacaacaacagtaactttccttggacagcggccagcaaatatcatctcaatggccgcgactcgctggtgaatccaggaccagctatggccagtcacaaggacgatgaagaaaaatttttccctatgcacggcaatctaatatttggcaaagaagggacaacggcaagtaacgcagaattagataatgtaatgattacggatgaagaagagattcgtaccaccaatcctgtggcaacagagcagtatggaactgtggcaaataacttgcagagctcaaatacagctcccacgactagaactgtcaatgatcagggggccttacctggcatggtgtggcaagatcgtgacgtgtaccttcaaggacctatctgggcaaagattcctcacacggatggacactttcatccttctcctctgatgggaggctttggactgaaacatccgcctcctcaaatcatgatcaaaaatactccggtaccggcaaatcctccgacgactttcagcccggccaagtttgcttcatttatcactcagtactccactggacaggtcagcgtggaaattgagtgggagctacagaaagaaaacagcaaacgttggaatccagagattcagtacacttccaactacaacaagtctgttaatgtggactttactgtagacactaatggtgtttatagtgaacctcgccctattggaacccggtatctcacacgaaacttgtaa

SEQ ID NO: 609 - protein, 736 aa, Artificial Sequence
  Description of Artificial Sequence: Synthetic polypeptide
MAADGYLPDWLEDNLSEGIREWWALKPGVPQPKANQQHQDNRRGLVLPGYKYLGPGNGLDEGEPVNEADAAALEHDKAYDQQLKAGDNPYLKYNHADAEFQERLQEDTSFGGNLGRAVFQAKKRILEPLGLVEGAAKTAPGKKRPVDQSPQEPDSSSGVGKSGKQPARKRLNFGQTGDSESVPDPQPLGEPPAAPTSLGSNTMASGGGAPMADNNEGADGVGNSSGNWHCDSQWLGDRVITTSTRTWALPTYNSHLYKQISSQSGASNDNHYFGYSTPWGYFDFNRFHCHFSPRDWQRLINNNWGFRPKKLSFKLFNIQVKEVTQNDGTTTIANNLTSTVQVFTDSEYQLPYVLGSAHQGCLPPFPADVFMVPQYGYLTLNNGSQAVGRSSFYCLEYFPSQMLRTGNNFQFSYTFEDVPFHSSYAHSQSLDRLMNPLIDQYLYYLNRTQGTTSGTTNQSRLLFSQAGPQSMSLQARNWLPGPCYRQQRLSKTANDNNNSNFPWTAASKYHLNGRDSLVNPGPAMASHKDDEEKFFPMHGNLIFGKEGTTASNAELDNVMITDEEEIRTTNPVATEQYGTVANNLQSSNTAPTTRTVNDQGALPGMVWQDRDVYLQGPIWAKIPHTDGHFHPSPLMGGFGLKHPPPQIMIKNTPVPANPPTTFSPAKFASFITQYSTGQVSVEIEWELQKENSKRWNPEIQYTSNYNKSVNVDFTVDTNGVYSEPRPIGTRYLTRNL

SEQ ID NO: 610 - DNA, 2175 bp, Artificial Sequence
  Description of Artificial Sequence: Synthetic polynucleotide
atgtcttttgttgatcaccctccagattggttggaagaagttggtgaaggtcttcgcgagtttttgggccttgaagcgggcccaccgaaaccaaaacccaatcagcagcatcaagatcaagcccgtggtcttgtgctgcctggttataactatctcggacccggaaacggtctcgatcgaggagagcctgtcaacagggcagacgaggtcgcgcgagagcacgacatctcgtacaacgagcagcttgaggcgggagacaacccctacctcaagtacaaccacgcggacgccgagtttcaggagaagctcgccgacgacacgtccttcgggggaaacctcggaaaggcagtctttcaggccaagaaaagggttctcgaaccttttggcctggttgaagagggtgctaagacggcccctaccggaaagcggatagacgaccactttccaaaaagaaagaaggcccggaccgaagaggactccaagccttccacctcgtcagacgccgaagctggacccagcggatcccagcagctgcaaatcccagcccaaccagcctcaagtttgggagctgatacaatgtctgcgggaggtggcggcccattgggcgacaataaccaaggtgccgatggagtgggcaatgcctcgggagattggcattgcgattccacgtggatgggggacagagtcgtcaccaagtccacccgaacctgggtgctgcccagctacaacaaccaccagtaccgagagatcaaaagcggctccgtcgacggaagcaacgccaacgcctactttggatacagcaccccctgggggtactttgactttaaccgcttccacagccactggagcccccgagactggcaaagactcatcaacaactactggggcttcagaccccggtccctcagagtcaaaatcttcaacattcaagtcaaagaggtcacggtgcaggactccaccaccaccatcgccaacaacctcacctccaccgtccaagtgtttacggacgacgactaccagctgccctacgtcgtcggcaacgggaccgagggatgcctgccggccttccctccgcaggtctttacgctgccgcagtacggttacgcgacgctgaaccgcgacaacacagaaaatcccaccgagaggagcagcttcttctgcctagagtactttcccagcaagatgctgagaacgggcaacaactttgagtttacctacaactttgaggaggtgcccttccactccagcttcgctcccagtcagaacctcttcaagctggccaacccgctggtggaccagtacttgtaccgcttcgtgagcacaaataacactggcggagtccagttcaacaagaacctggccgggagatacgccaacacctacaaaaactggttcccggggcccatgggccgaacccagggctggaacctgggctccggggtcaaccgcgccagtgtcagcgccttcgccacgaccaataggatggagctcgagggcgcgagttaccaggtgcccccgcagccgaacggcatgaccaacaacctccagggcagcaacacctatgccctggagaacactatgatcttcaacagccagccggcgaacccgggcaccaccgccacgtacctcgagggcaacatgctcatcaccagcgagagcgagacgcagccggtgaaccgcgtggcgtacaacgtcggcgggcagatggccaccaacaaccagagctccaccactgcccccgcgaccggcacgtacaacctccaggaaatcgtgcccggcagcgtgtggatggagagggacgtgtacctccaaggacccatctgggccaagatcccagagacgggggtgcactttcacccctctccggccatgggcggattcggactcaaacacccaccgcccatgatgctcatcaagaacacgcctgtgcccggaaatatcaccagcttctcggacgtgcccgtcagcagcttcatcacccagtacagcaccgggcaggtcaccgtggagatggagtgggagctcaagaaggaaaactccaagaggtggaacccagagatccagtacacaaacaactacaacgacccccagtttgtggactttgccccggacagcaccggggaatacagaaccaccagacctatcggaacccgataccttacccgacccctttaa

SEQ ID NO: 611 - protein, 724 aa, Artificial Sequence
  Description of Artificial Sequence: Synthetic polypeptide
MSFVDHPPDWLEEVGEGLREFLGLEAGPPKPKPNQQHQDQARGLVLPGYNYLGPGNGLDRGEPVNRADEVAREHDISYNEQLEAGDNPYLKYNHADAEFQEKLADDTSFGGNLGKAVFQAKKRVLEPFGLVEEGAKTAPTGKRIDDHFPKRKKARTEEDSKPSTSSDAEAGPSGSQQLQIPAQPASSLGADTMSAGGGGPLGDNNQGADGVGNASGDWHCDSTWMGDRVVTKSTRTWVLPSYNNHQYREIKSGSVDGSNANAYFGYSTPWGYFDFNRFHSHWSPRDWQRLINNYWGFRPRSLRVKIFNIQVKEVTVQDSTTTIANNLTSTVQVFTDDDYQLPYVVGNGTEGCLPAFPPQVFTLPQYGYATLNRDNTENPTERSSFFCLEYFPSKMLRTGNNFEFTYNFEEVPFHSSFAPSQNLFKLANPLVDQYLYRFVSTNNTGGVQFNKNLAGRYANTYKNWFPGPMGRTQGWNLGSGVNRASVSAFATTNRMELEGASYQVPPQPNGMTNNLQGSNTYALENTMIFNSQPANPGTTATYLEGNMLITSESETQPVNRVAYNVGGQMATNNQSSTTAPATGTYNLQEIVPGSVWMERDVYLQGPIWAKIPETGVHFHPSPAMGGFGLKHPPPMMLIKNTPVPGNITSFSDVPVSSFITQYSTGQVTVEMEWELKKENSKRWNPEIQYTNNYNDPQFVDFAPDSTGEYRTTRPIGTRYLTRPL

SEQ ID NO: 612 - DNA, 2175 bp, Artificial Sequence
  Description of Artificial Sequence: Synthetic polynucleotide
  misc_feature (1652)..(1652): n is a, c, g or t
atgtcttttgttgatcaccctccagattggttggaagaagttggtgaaggtcttcgcgagtttttgggccttgaagcgggcccaccgaaaccaaaacccaatcagcagcatcaagatcaagcccgtggtcttgtgctgcctggttataactatctcggacccggaaacggtctcgatcgaggagagcctgtcaacagggcagacgaggtcgcgcgagagcacgacatctcgtacaacgagcagcttgaggcgggagacaacccctacctcaagtacaaccacgcggacgccgagtttcaggagaagctcgccgacgacacatccttcgggggaaacctcggaaaggcagtctttcaggccaagaaaagggttctcgaaccttttggcctggttgaagagggtgctaagacggcccctaccggaaagcggatagacgaccactttccaaaaagaaagaaggcccggaccgaggaggactccaagccttccacctcgtcagacgccgaagctggacccagcggatcccagcagctgcaaatcccagcccaaccagcctcaagtttgggagctgatacaatgtctgcgggaggtggcggcccattgggcgacaataaccaaggtgccgatggagtgggcaatgcctcgggagattggcattgcgattccacgtggatgggggacagagtcgtcaccaagtccacccgaacctgggtgctgcccagctacaacaaccaccagtaccgagagatcaaaagcggctccgtcgacggaagcaacgccaacgcctactttggatacagcaccccctgggggtactttgactttaaccgcttccacagccactggagcccccgagactggcaaagactcatcaacaactactggggcttcagaccccggtccctcagagtcaaaatcttcaacattcaagtcaaagaggtcacggtgcaggactccaccaccaccatcgccaacaacctcacctccaccgtccaagtgtttacggacgacgactaccagctgccctacgtcgtcggcaacgggaccgagggatgcctgccggccttccctccgcaggtctttacgctgccgcagtacggttacgcgacgctgaaccgcgacaacacagaaaatcccaccgagaggagcagcttcttctgcctagagtactttcccagcaagatgctgagaacgggcaacaactttgagtttacctacaactttgaggaggtgcccttccactccagcttcgctcccagtcagaacctcttcaagctggccaacccgctggtggaccagtacttgtaccgcttcgtgagcacaaataacactggcggagtccagttcaacaagaacctggccgggagatacgccaacacctacaaaaactggttcccggggcccatgggccgaacccagggctggaacctgggctccggggtcaaccgcgccagtgtcagcgccttcgccacgaccaataggatggagctcgagggcgcgagttaccaggtgcccccgcagccgaacggcatgaccaacaacctccagggcagcaacacctatgccctggagaacactatgatcttcaacagccagccggcgaacccgggcaccaccgccacgtacctcgagggcagcatgctcatcaccancgagagcgagacgcagccggtgaaccgcgtggcgtacaacgtcggcgggcagatggccaccaacaaccagagctccaccactgcccccgcgaccggcacgtacaacctccaggaaatcgtgcccggcagcgtgtggatggagagggacgtgtacctccaaggacccatctgggccaagatcccagagacgggggcgcactttcacccctctccggccatgggcggattcggactcaaacacccaccgcccatgatgctcatcaagaacacgcctgtgcccggaaatatcaccagcttctcggacgtgcccgtcagcagcttcatcacccagtacagcaccgggcaggtcaccgtggagatggagtgggagctcaagaaggaaaactccaagaggtggaacccagagatccagtacacaaacaactacaacgacccccagtttgtggactttgccccggacagcaccggggaatacagaaccaccagacctatcggaacccgataccttacccgacccctttaa

SEQ ID NO: 613 - protein, 724 aa, Artificial Sequence
  Description of Artificial Sequence: Synthetic polypeptide
  MOD_RES (551)..(551): Xaa = any amino acid
MSFVDHPPDWLEEVGEGLREFLGLEAGPPKPKPNQQHQDQARGLVLPGYNYLGPGNGLDRGEPVNRADEVAREHDISYNEQLEAGDNPYLKYNHADAEFQEKLADDTSFGGNLGKAVFQAKKRVLEPFGLVEEGAKTAPTGKRIDDHFPKRKKARTEEDSKPSTSSDAEAGPSGSQQLQIPAQPASSLGADTMSAGGGGPLGDNNQGADGVGNASGDWHCDSTWMGDRVVTKSTRTWVLPSYNNHQYREIKSGSVDGSNANAYFGYSTPWGYFDFNRFHSHWSPRDWQRLINNYWGFRPRSLRVKIFNIQVKEVTVQDSTTTIANNLTSTVQVFTDDDYQLPYVVGNGTEGCLPAFPPQVFTLPQYGYATLNRDNTENPTERSSFFCLEYFPSKMLRTGNNFEFTYNFEEVPFHSSFAPSQNLFKLANPLVDQYLYRFVSTNNTGGVQFNKNLAGRYANTYKNWFPGPMGRTQGWNLGSGVNRASVSAFATTNRMELEGASYQVPPQPNGMTNNLQGSNTYALENTMIFNSQPANPGTTATYLEGSMLITXESETQPVNRVAYNVGGQMATNNQSSTTAPATGTYNLQEIVPGSVWMERDVYLQGPIWAKIPETGAHFHPSPAMGGFGLKHPPPMMLIKNTPVPGNITSFSDVPVSSFITQYSTGQVTVEMEWELKKENSKRWNPEIQYTNNYNDPQFVDFAPDSTGEYRTTRPIGTRYLTRPL

SEQ ID NO: 614 - DNA, 2208 bp, Artificial Sequence
  Description of Artificial Sequence: Synthetic polynucleotide
atggctgccgatggttatcttccagattggctcgaggacaaccttagtgaaggaattcgcgagtggtgggctttgaaacctggagcccctcaacccaaggcaaatcaacaacatcaagacaacgctcgaggtcttgtgcttccgggttacaaataccttggacccggcaacggactcgacaagggggagccggtcaacgcagcagacgcggcggccctcgagcacgacaaggcctacgaccagcagctcaaggccggagacaacccgtacctcaagtacaaccacgccgacgccgagttccaggagcggctcaaagaagatacgtcttttgggggcaacctcgggcgagcagtcttccaggccaaaaagaggcttcttgaacctcttggtctggttgaggaagcggctaagacggctcctggaaagaagaggcctgtagagcagtctcctcaggaaccggactcctccgcgggtattggcaaatcgggtgcacagcccgctaaaaagagactcaatttcggtcagactggcgacacagagtcagtcccagaccctcaaccaatcggagaacctcccgcagccccctcaggtgtgggatctcttacaatggcttcaggtggtggcgcaccagtggcagacaataacgaaggtgccgatggagtgggtagttcctcgggaaattggcattgcgattcccaatggctgggggacagagtcatcaccaccagcacccgaacctgggccctgcccacctacaacaatcacctctacaagcaaatctccaacagcacatctggaggatcttcaaatgacaacgcctacttcggctacagcaccccctgggggtattttgacttcaacagattccactgccacttctcaccacgtgactggcagcgactcatcaacaacaactggggattccggcctaagcgactcaacttcaagctcttcaacattcaggtcaaagaggttacggacaacaatggagtcaagaccatcgccaataaccttaccagcacggtccaggtcttcacggactcagactatcagctcccgtacgtgctcgggtcggctcacgagggctgcctcccgccgttcccagcggacgttttcatgattcctcagtacgggtatctgacgcttaatgatggaagccaggccgtgggtcgttcgtccttttactgcctggaatatttcccgtcgcaaatgctaagaacgggtaacaacttccagttcggctacgagtttgagaacgtacctttccatagcagctacgctcacagccaaagcctggaccgactaatgaatccactcatcgaccaatacttgtactatctctcaaagactattaacggttctggacagaatcaacaaacgctaaaattcagtgtggccggacccagcaacatggctgtccagggaagaaactacatacctggacccagctaccgacaacaacgtgtctcaaccactgtgactcaaaacaacaacagcgaatttgcttggcctggagcttcttcttgggctctcaatggacgtaatagcttgatgaatcctggacctgctatggccagccacaaagaaggagaggaccgtttctttcctttgtctggatctttaatttttggcaaacaaggaactggaagagacaacgtggatgcggacaaagtcatgataaccaacgaagaagaaattaaaactactaacccggtagcaacggagtcctatggacaagtggccacaaaccaccagagtgcccaagcacaggcgcagaccggctgggttcaaaaccaaggaatacttccgggtatggtttggcaggacagagatgtgtacctgcaaggacccatttgggccaaaattcctcacacggacggcaactttcacccttctccgctgatgggagggtttggaatgaagcacccgcctcctcagatcctcatcaaaaacacacctgtacctgcggatcctccaacggccttcaacaaggacaagctgaactctttcatcacccagtattctactggccaagtcagcgtggagatcgagtgggagctgcagaaggaaaacagcaagcgctgggacccggagatccagtacacttccaactattacaagtctaataatgttgaatttgctgttaatactgaaggtgtatatagtgaaccccgccccattggcaccagatacctgactcgtaatctg

SEQ ID NO: 615 - protein, 736 aa, Artificial Sequence
  Description of Artificial Sequence: Synthetic polypeptide
MAADGYLPDWLEDNLSEGIREWWALKPGAPQPKANQQHQDNARGLVLPGYKYLGPGNGLDKGEPVNAADAAALEHDKAYDQQLKAGDNPYLKYNHADAEFQERLKEDTSFGGNLGRAVFQAKKRLLEPLGLVEEAAKTAPGKKRPVEQSPQEPDSSAGIGKSGAQPAKKRLNFGQTGDTESVPDPQPIGEPPAAPSGVGSLTMASGGGAPVADNNEGADGVGSSSGNWHCDSQWLGDRVITTSTRTWALPTYNNHLYKQISNSTSGGSSNDNAYFGYSTPWGYFDFNRFHCHFSPRDWQRLINNNWGFRPKRLNFKLFNIQVKEVTDNNGVKTIANNLTSTVQVFTDSDYQLPYVLGSAHEGCLPPFPADVFMIPQYGYLTLNDGSQAVGRSSFYCLEYFPSQMLRTGNNFQFGYEFENVPFHSSYAHSQSLDRLMNPLIDQYLYYLSKTINGSGQNQQTLKFSVAGPSNMAVQGRNYIPGPSYRQQRVSTTVTQNNNSEFAWPGASSWALNGRNSLMNPGPAMASHKEGEDRFFPLSGSLIFGKQGTGRDNVDADKVMITNEEEIKTTNPVATESYGQVATNHQSAQAQAQTGWVQNQGILPGMVWQDRDVYLQGPIWAKIPHTDGNFHPSPLMGGFGMKHPPPQILIKNTPVPADPPTAFNKDKLNSFITQYSTGQVSVEIEWELQKENSKRWDPEIQYTSNYYKSNNVEFAVNTEGVYSEPRPIGTRYLTRNL

SEQ ID NO: 616 - DNA, 2208 bp, Artificial Sequence
  Description of Artificial Sequence: Synthetic polynucleotide
atggctgccgatggttatcttccagattggctcgaggacaaccttagtgaaggaattcgcgagtggtgggctttgaaacctggagcccctcaacccaaggcaaatcaacaacatcaagacaacgctcgaggtcttgtgcttccgggttacaaataccttggacccggcaacggactcgacaagggggagccggtcaacgcagcagacgcggcggccctcgagcacgacaaggcctacgaccagcagctcaaggccggagacaacccgtacctcaagtacaaccacgccgacgccgagttccaggagcggctcaaagaagatacgtcttttgggggcaacctcgggcgagcagtcttccaggccaaaaagaggcttcttgaacctcttggtctggttgaggaagcggctaagacggctcctggaaagaagaggcctgtagagcagtctcctcaggaaccggactcctccgcgggtattggcaaatcgggtgcacagcccgctaaaaagagactcaatttcggtcagactggcgacacagagtcagtcccagaccctcaaccaatcggagaacctcccgcagccccctcaggtgtgggatctcttacaatggcttcaggtggtggcgcaccagtggcagacaataacgaaggtgccgatggagtgggtagttcctcgggaaattggcattgcgattcccaatggctgggggacagagtcatcaccaccagcacccgaacctgggccctgcccacctacaacaatcacctctacaagcaaatctccaacagcacatctggaggatcttcaaatgacaacgcctacttcggctacagcaccccctgggggtattttgacttcaacagattccactgccgcttctcaccacgtgactggcagcgactcatcaacaacaactggggattccggcctaagcgactcaacttcaagctcttcaacattcaggtcaaagaggttacggacaacaatggagtcaagaccatcgccaataaccttaccagcacggtccaggtcttcacggactcagactatcagctcccgtacgtgctcgggtcggctcacgagggctgcctcccgccgttcccagcggacgttttcatgattcctcagtacgggtatctgacgcttaatgatggaagccaggccgtgggtcgttcgtccttttactgcctggaatatttcccgtcgcaaatgctaagaacgggtaacaacttccagttcagctacgagtttgagaacgtacctttccatagcagctacgctcacagccaaagcctggaccgactaatgaatccactcatcgaccaatacttgtactatctctcaaagactattaacggttctggacagaatcaacaaacgctaaaattcagtgtggccggacccagcaacatggctgtccagggaagaaactacatacctggacccagctaccgacaacaacgtgtctcaaccactgtgactcaaaacaacaacagcgaatttgcttggcctggagcttcttcttgggctctcaatggacgtaatagcttgatgaatcctggacctgctatggccagccacaaagaaggagaggaccgtttctttcctttgtctggatctttaatttttggcaaacaaggaactggaagagacaacgtggatgcggacaaagtcatgataaccaacgaagaagaaattaaaactactaacccggtagcaacggagtcctatggacaagtggccacaaaccaccagagtgcccaagcacaggcgcagaccggctgggttcaaaaccaaggaatacttccgggtatggtttggcaggacagagatgtgtacctgcaaggacccatttgggccaaaattcctcacacggacggcaactttcacccttctccgctgatgggagggtttggaatgaagcacccgcctcctcagatcctcatcaaaaacgcccctgtacctgcggatcctccaacggccttcaacaaggacaagctgaactctttcatcacccagtattctactggccaagtcagcgtggagatcgagtgggagctgcagaaggaaaacagcaagcgctggaacccggagatccagtacacttccaactattacaagtctaataatgttgaatttgctgttaatactgaaggtgtatatagtgaaccccgccccattggcaccagatacctgactcgtaatctg

SEQ ID NO: 617 - protein, 736 aa, Artificial Sequence
  Description of Artificial Sequence: Synthetic polypeptide
MAADGYLPDWLEDNLSEGIREWWALKPGAPQPKANQQHQDNARGLVLPGYKYLGPGNGLDKGEPVNAADAAALEHDKAYDQQLKAGDNPYLKYNHADAEFQERLKEDTSFGGNLGRAVFQAKKRLLEPLGLVEEAAKTAPGKKRPVEQSPQEPDSSAGIGKSGAQPAKKRLNFGQTGDTESVPDPQPIGEPPAAPSGVGSLTMASGGGAPVADNNEGADGVGSSSGNWHCDSQWLGDRVITTSTRTWALPTYNNHLYKQISNSTSGGSSNDNAYFGYSTPWGYFDFNRFHCRFSPRDWQRLINNNWGFRPKRLNFKLFNIQVKEVTDNNGVKTIANNLTSTVQVFTDSDYQLPYVLGSAHEGCLPPFPADVFMIPQYGYLTLNDGSQAVGRSSFYCLEYFPSQMLRTGNNFQFSYEFENVPFHSSYAHSQSLDRLMNPLIDQYLYYLSKTINGSGQNQQTLKFSVAGPSNMAVQGRNYIPGPSYRQQRVSTTVTQNNNSEFAWPGASSWALNGRNSLMNPGPAMASHKEGEDRFFPLSGSLIFGKQGTGRDNVDADKVMITNEEEIKTTNPVATESYGQVATNHQSAQAQAQTGWVQNQGILPGMVWQDRDVYLQGPIWAKIPHTDGNFHPSPLMGGFGMKHPPPQILIKNAPVPADPPTAFNKDKLNSFITQYSTGQVSVEIEWELQKENSKRWNPEIQYTSNYYKSNNVEFAVNTEGVYSEPRPIGTRYLTRNL

SEQ ID NO: 618 - DNA, 2208 bp, Artificial Sequence
  Description of Artificial Sequence: Synthetic polynucleotide
atggctgccgatggttatcttccagattggctcgaggacaaccttagtgaaggaattcgcgagtggtgggctttgaaacctggagcccctcaacccaaggcaaatcaacaacatcaagacaacgctcgaggtcttgtgcttccgggttacaaataccttggacccggcaacggactcgacaagggggagccggtcagcgcagcagacgcggcggccctcgagcacgacaaggcctacgaccagcagctcaaggccggagacaacccgtacctcaagtacaaccacgccgacgccgagttccaggagcggctcaaagaagatacgtcttttgggggcaacctcgggcgagcagtcttccaggccaaaaagaggcttcttgaacctcttggtctggttgaggaagcggctaagacggctcctggaaagaagaggcctgtagagcagtctcctcaggaaccggactcctccgcgggtattggcaaatcgggtgcacagcccgctaaaaagagactcaatttcggtcagactggcgacacagagtcagtcccagaccctcaaccaatcggagaacctcccgcagccccctcaggtgtgggatctcttacaatggcttcaggtggtggcgcaccagtggcagacaataacgaaggtgccgatggagtgggtagttcctcgggaaattggcattgcgattcccaatggctgggggacagagtcatcaccaccagcacccgaacctgggccctgcccacctacaacaatcacctctacaagcaaatctccaacagcacatctggaggatcttcaaatgacaacgcctacttcggctacagcaccccctgggggtattttgacttcaacagattccactgccacttctcaccgcgtgactggcagcgactcatcaacaacaactggggattccggcctaagcgactcaacttcaagctcttcaacattcaggtcaaagaggttacggacaacaatggagtcaagaccatcgccaataaccttaccagcacggtccaggtcttcacggactcagactatcagctcccgtacgtgctcgggtcggctcacgagggctgcctcccgccgttcccagcggacgttttcatgattcctcagtacgggtatctgacgcttaatgatggaagccaggccgtgggtcgttcgtccttttactgcctggaatatttcccgtcgcaaatgctaagaacgggtaacaacttccagttcagctacgagtttgagaacgtacctttccatagcagctacgctcacagccaaagcctggaccgactaatgaatccactcatcgaccaatacttgtactatctctcaaagactattaacggttctggacagaatcaacaaacgctaaaattcagtgtggccggacccagcaacatggctgtccagggaagaaactacatacctggacccagctaccgacaacaacgtgtctcaaccactgtgactcaaaacaacaacagcgaatttgcttggcctggagcttcttcttgggctctcaatggacgtaatagcttgatgaatcctggacctgctatggccagccacaaagaaggagaggaccgtttctttcctttgtctggatctttaatttttggcaaacaaggaactggaagagacaacgtggatgcggacaaagtcatgataaccaacgaagaagaaattaaaactactaacccggtagcaacggagtcctatggacaagtggccacaaaccaccagagtgcccaagcacaggcgcagaccggctgggttcaaaaccaaggaatacttccgggtatggtttggcaggacagagatgtgtacctgcaaggacccatttgggccaaaattcctcacacggacggcaactttcacccttctccgctgatgggagggtttggaatgaagcacccgcctcctcagatcctcatcaaaaacacacctgtacctgcggatcctccaacggccttcaacaaggacaagctgaactctttcatcacccagtattctactggccaagtcagcgtggagatcgagtgggagctgcagaaggaaaacagcaagcgctggaacccggagatccagtacacttccaactattacaagtctaataatgttgaatttgctgttaatactgaaggtgtatatagtgaaccccgccccattggcaccagatacctgactcgtaatctg

SEQ ID NO: 619 - protein, 736 aa, Artificial Sequence
  Description of Artificial Sequence: Synthetic polypeptide
MAADGYLPDWLEDNLSEGIREWWALKPGAPQPKANQQHQDNARGLVLPGYKYLGPGNGLDKGEPVSAADAAALEHDKAYDQQLKAGDNPYLKYNHADAEFQERLKEDTSFGGNLGRAVFQAKKRLLEPLGLVEEAAKTAPGKKRPVEQSPQEPDSSAGIGKSGAQPAKKRLNFGQTGDTESVPDPQPIGEPPAAPSGVGSLTMASGGGAPVADNNEGADGVGSSSGNWHCDSQWLGDRVITTSTRTWALPTYNNHLYKQISNSTSGGSSNDNAYFGYSTPWGYFDFNRFHCHFSPRDWQRLINNNWGFRPKRLNFKLFNIQVKEVTDNNGVKTIANNLTSTVQVFTDSDYQLPYVLGSAHEGCLPPFPADVFMIPQYGYLTLNDGSQAVGRSSFYCLEYFPSQMLRTGNNFQFSYEFENVPFHSSYAHSQSLDRLMNPLIDQYLYYLSKTINGSGQNQQTLKFSVAGPSNMAVQGRNYIPGPSYRQQRVSTTVTQNNNSEFAWPGASSWALNGRNSLMNPGPAMASHKEGEDRFFPLSGSLIFGKQGTGRDNVDADKVMITNEEEIKTTNPVATESYGQVATNHQSAQAQAQTGWVQNQGILPGMVWQDRDVYLQGPIWAKIPHTDGNFHPSPLMGGFGMKHPPPQILIKNTPVPADPPTAFNKDKLNSFITQYSTGQVSVEIEWELQKENSKRWNPEIQYTSNYYKSNNVEFAVNTEGVYSEPRPIGTRYLTRNL

SEQ ID NO: 620 - DNA, 2208 bp, Artificial Sequence
  Description of Artificial Sequence: Synthetic polynucleotide
atggctgccgatggttatcttccagattggctcgaggacaaccttagtgaaggaattcgcgagtggtgggctttgaaacctggagcccctcaacccaaggcaaatcaacaacatcaagacaacgctcgaggtcttgtgcttccgggttacaaataccttggacccggcaacggactcgacaagggggagccggtcaacgcagcagacgcggcggccctcgagcacgacaaggcctacgaccagcagctcaaggccggagacaacccgtacctcaagtacaaccacgccgacgccgagttccaggagcggctcaaagaagatacgtcttttgggggcaacctcgggcgagcagtcttccaggccaaaaagaggcttcttgaacctcttggtctggttgaggaagcggctaagacggctcctggaaagaagaggcctgtagagcagtctcctcaggaaccggactcctccgcgggtattggcaaatcgggtgcacagcccgctaaaaagagactcaatttcggtcagactggcgacacagagtcagtcccagaccctcaaccaatcggagaacctcccgcagccccctcaggtgtgggatctcttacaatggcttcaggtggtggcgcaccagtggcagacaataacgaaggtgccgatggagtgggtagttcctcgggaaattggcattgcgattcccaatggctgggggacagagtcatcaccaccagcacccgaacctgggccctgcccacctacaacaatcacctctacaagcaaatctccaacagcacatctggaggatcttcaaatgacaacgcctacttcggctacagcaccccctgggggtattttgacttcaacagattccactgccacttctcaccacgtgactggcagcgactcatcaacaacaactggggattccggcctaagcgactcaacttcaagctcttcaacattcaggtcaaagaggttacggacaacaatggagtcaagaccatcgccaataaccttaccagcacggtccaggtcttcacggactcagactatcagctcccgtacgtgctcgggtcggctcacgagggctgcctcccgccgttcccagcggacgttttcatgattcctcagtacgggtatctgacgcttaatgatggaagccaggccgtgggtcgttcgtccttttactgcctggaatatttcccgtcgcaaatgctaagaacgggtaacaacttccagttcagctacgagtttgagaacgtacctttccatagcagctacgctcacagccaaagcctggaccgactaatgaatccactcatcgaccaatacttgtactatctctcaaagactattaacggttctggacagaatcaacaaacgctaaaattcagtgtggccggacccagcaacacggctgtccagggaagaaactacatacctggacccagctaccgacaacaacgtgtctcaaccactgtgactcaaaacaacaacagcgaatttgcttggcctggagcttcttcttgggctctcaatggacgtaatagcttgatgaatcctggacctgctatggccagccacaaagaaggagaggaccgtttctttcctttgtctggatctttaatttttggcaaacaaggaactggaagagacaacgtggatgcggacaaagtcatgataaccaacgaagaagaaattaaaactactaacccggtagcaacggagtcctatggacaagtggccacaaaccaccagagtgcccaagcacaggcgcagaccggctgggttcaaaaccaaggaatacttccgggtatggtttggcaggacagagatgtgtacctgcaaggacccatttgggccaaaattcctcacacggacggcaactttcacccttctccgctgatgggagggtttggaatgaagcacccgcctcctcagatcctcatcaaaaacacacctgtacctgcggatcctccaacggccttcaacaaggacaagctgaactctttcatcacccagtattctactggccaagtcagcgtggagatcgagtgggagctgcagaaggaaaacagcaagcgctggaacccggagatccagtacacttccaactattacaagtctaataatgttgaatttgctgttaatactgaaggtgtatatagtgaaccccgccccattggcaccagatacctgactcgtaatctg

SEQ ID NO: 621 - protein, 736 aa, Artificial Sequence
  Description of Artificial Sequence: Synthetic polypeptide
MAADGYLPDWLEDNLSEGIREWWALKPGAPQPKANQQHQDNARGLVLPGYKYLGPGNGLDKGEPVNAADAAALEHDKAYDQQLKAGDNPYLKYNHADAEFQERLKEDTSFGGNLGRAVFQAKKRLLEPLGLVEEAAKTAPGKKRPVEQSPQEPDSSAGIGKSGAQPAKKRLNFGQTGDTESVPDPQPIGEPPAAPSGVGSLTMASGGGAPVADNNEGADGVGSSSGNWHCDSQWLGDRVITTSTRTWALPTYNNHLYKQISNSTSGGSSNDNAYFGYSTPWGYFDFNRFHCHFSPRDWQRLINNNWGFRPKRLNFKLFNIQVKEVTDNNGVKTIANNLTSTVQVFTDSDYQLPYVLGSAHEGCLPPFPADVFMIPQYGYLTLNDGSQAVGRSSFYCLEYFPSQMLRTGNNFQFSYEFENVPFHSSYAHSQSLDRLMNPLIDQYLYYLSKTINGSGQNQQTLKFSVAGPSNTAVQGRNYIPGPSYRQQRVSTTVTQNNNSEFAWPGASSWALNGRNSLMNPGPAMASHKEGEDRFFPLSGSLIFGKQGTGRDNVDADKVMITNEEEIKTTNPVATESYGQVATNHQSAQAQAQTGWVQNQGILPGMVWQDRDVYLQGPIWAKIPHTDGNFHPSPLMGGFGMKHPPPQILIKNTPVPADPPTAFNKDKLNSFITQYSTGQVSVEIEWELQKENSKRWNPEIQYTSNYYKSNNVEFAVNTEGVYSEPRPIGTRYLTRNL

SEQ ID NO: 622 - DNA, 2208 bp, Artificial Sequence
  Description of Artificial Sequence: Synthetic polynucleotide
atggctgccgatggttatcttccagattggctcgaggacaaccttagtgaaggaattcgcgagtggtgggctttgaaacctggagcccctcaacccaaggcaaatcaacaacatcaagacaacgctcgaggtcttgtgcttccgggttacaaataccttggacccggcaacggactcgacaagggggagccggtcaacgcagcagacgcggcggccctcgagcacgacaaggcctacgaccagcagctcaaggccggagacaacccgtacctcaagtacaaccacgccgacgccgagttccaggagcggctcaaagaagatacgtcttttgggggcaacctcgggcgagcagtcttccaggccaaaaagaggcttcttgaacctcttggtctggttgaggaagcggctaagacggctcctggaaagaagaggcctgtagagcagtctcctcaggaaccggactcctccgcgggtattggcaaatcgggtgcacagcccgctaaaaagagactcaatttcggtcagactggcgacacagagtcagtcccagaccctcaaccaatcggagaacctcccgcagccccctcaggtgtgggatctcttacaatggcttcaggtggtggcgcaccagtggcagacaataacgaaggtgccgatggagtgggtagttcctcgggaaattggcattgcgattcccaatggctgggggacagagtcatcaccaccagcacccgaacctgggccctgcccacctacaacaatcacctctacaagcaaatctccaacagcacatctggaggatcttcaaatgacaacgcctacttcggctacagcaccccctgggggtattttgacttcaacagattccactgccacttctcaccacgtgactggcagcgactcatcaacaacaactggggattccggcctaagcggctcaacttcaagctcttcaacattcaggtcaaagaggttacggacaacaatggagtcaagaccatcgccaataaccttaccagcacggtccaggtcttcacggactcagactatcagctcccgtacgtgctcgggtcggctcacgagggctgcctcccgccgttcccagcggacgttttcatgattcctcagtacgggtatctgacgcttaatgatggaagccaggccgtgggtcgttcgtccttttactgcctggaatatttcccgtcgcaaatgctaagaacgggtagcaacttccagttcagctacgagtttgagaacgtacctttccatagcagctacgctcacagccaaagcctggaccgactaatgaatccactcatcgaccaatacttgtactatctctcaaagactattaacggttctggacagaatcaacaaacgctaaaattcagtgtggccggacccagcaacatggctgtccagggaagaaactacatacctggacccagctaccgacaacaacgtgtctcaaccactgtgactcaaaacaacaacagcgaatttgcttggcctggagcttcttcttgggctctcaatggacgtaatagcttgatgaatcctggacctgctatggccagccacaaagaaggagaggaccgtttctttcctttgtctggatctttaatttttggcaaacaaggaactggaagagacaacgtggatgcggacaaagtcatgataaccaacgaagaagaaattaaaactactaacccggcagcaacggagtcctatggacaagtggccacaaaccaccagagtgcccaagcacaggcgcagaccggctgggttcaaaaccaaggaatacttccgggtatggtttggcaggacagagatgtgtacctgcaaggacccatttgggccaaaattcctcacacggacggcaactttcacccttctccgctgatgggagggtttggaatgaagcacccgcctcctcagatcctcatcaaaaacacacctgtacctgcggatcctccaacggccttcaacaaggacaagctgaactctttcatcacccagtattctactggccaagtcagcgtggagatcgagtgggagctgcagaaggaaaacagcaagcgctggaacccggagatccagcacacttccaactattacaagtctaataatgttgaatttgctgttaatactgaaggtgtatatagtgaaccccgccccattggcaccagatacctgactcgtaatctg

SEQ ID NO: 623 - DNA, 2208 bp, Artificial Sequence
  Description of Artificial Sequence: Synthetic polynucleotide
atggctgccgatggttatcttccagattggctcgaggacaaccttagtgaaggaattcgcgagtggtgggctttgaaacctggagcccctcaacccaaggcaaatcaacaacatcaagacaacgctcgaggtcttgtgcttccgggttacaaataccttggacccggcaacggactcgacaagggggagccggtcaacgcagcagacgcggcggccctcgagcacgacaaggcctacgaccagcagctcaaggccggagacaacccgtacctcaagtacaaccacgccgacgccgagttccaggagcggctcaaagaagatacgtcttttgggggcaacctcgggcgagcagtcttccaggccaaaaagaggcttcttgaacctcttggtctggttgaggaagcggctaagacggctcctggaaagaagaggcctgtagagcagtctcctcaggaaccggactcctccgcgggtattggcaaatcgggtgcacagcccgctaaaaagagactcaatttcggtcagactggcgacacagagtcagtcccagaccctcaaccaatcggagaacctcccgcagccccctcaggtgtgggatctcttacaatggcttcaggtggtggcgcaccagtggcagacaataacgaaggtgccgatggagtgggtagttcctcgggaaattggcattgcgattcccaatggctgggggacagagtcatcaccaccagcacccgaacctgggccctgcccacctacaacaatcacctctacaagcaaatctccaacagcacatctggaggatcttcaaatgacaacgcctacttcggctacagcaccccctgggggtattttgacttcaacagattccactgccacttctcaccacgtgactggcagcgactcatcaacaacaactggggattccggcctaagcgactcaacttcaggctcttcaacattcaggtcaaagaggttacggacaacaatggagtcaagaccatcgccaataaccttaccagcacggtccaggtcttcacggactcagactatcagctcccgtacgtgctcgggtcggctcacgagggctgcctcccgccgttcccagcggacgttttcatgattcctcagtacgggtatctgacgcttaatgatggaagccaggccgtgggtcgttcgtccttttactgcctggaatatttcccgtcgcaaatgctaagaacgggtaacaacttccagttcagctacgagtttgagaacgtacctttccatagcagctacgctcacagccaaagcctggaccgactaatgaatccactcatcgaccaatacttgtactatctctcaaagactattaacggttctggacagaatcaacaaacgctaaaattcagtgtggccggacccagcaacatggctgtccagggaagaaactacatacctggacccagctaccgacaacaacgtgtctcaaccactgtgactcaaaacaacaacagcgaatttgcttggcctggagcttcttcttgggctctcaatggacgtaatagcttgatgaatcctggacctgctatggccagccacaaagaaggagaggaccgtttctttcctttgtctggatctttaatttttggcaaacaaggaactggaagagacaacgtggatgcggacaaagtcatgataaccaacgaagaagaaattaaaactactaacccggtagcaacggagtcctatggacaagtggccacaaaccaccagagtgcccaagcacaggcgcagaccggctgggttcaaagccaaggaatacttccgggtatggtttggcaggacagagatgtgtacctgcaaggacccatttgggccaaaattcctcacacggacggcaactttcacccttctccgctgatgggagggtttggaatgaagcacccgcctccccagatcctcatcaaaaacacacctgtacctgcggatcctccaacggccttcaacaaggacaagctgaactctttcatcacccagtattctactggccaagtcagcgtggagatcgagtgggagctgcagaaggaaaacagcaagcgctggaacccggagatccagtacacttccaactattacaagtctaataatgttgaatttgctgttaatactgaaggtgtatatagtgaaccccgccccattggcaccagatacctgactcgtaatctg

SEQ ID NO: 624 - protein, 736 aa, Artificial Sequence
  Description of Artificial Sequence: Synthetic polypeptide
MAADGYLPDWLEDNLSEGIREWWALKPGAPQPKANQQHQDNARGLVLPGYKYLGPGNGLDKGEPVNAADAAALEHDKAYDQQLKAGDNPYLKYNHADAEFQERLKEDTSFGGNLGRAVFQAKKRLLEPLGLVEEAAKTAPGKKRPVEQSPQEPDSSAGIGKSGAQPAKKRLNFGQTGDTESVPDPQPIGEPPAAPSGVGSLTMASGGGAPVADNNEGADGVGSSSGNWHCDSQWLGDRVITTSTRTWALPTYNNHLYKQISNSTSGGSSNDNAYFGYSTPWGYFDFNRFHCHFSPRDWQRLINNNWGFRPKRLNFKLFNIQVKEVTDNNGVKTIANNLTSTVQVFTDSDYQLPYVLGSAHEGCLPPFPADVFMIPQYGYLTLNDGSQAVGRSSFYCLEYFPSQMLRTGSNFQFSYEFENVPFHSSYAHSQSLDRLMNPLIDQYLYYLSKTINGSGQNQQTLKFSVAGPSNMAVQGRNYIPGPSYRQQRVSTTVTQNNNSEFAWPGASSWALNGRNSLMNPGPAMASHKEGEDRFFPLSGSLIFGKQGTGRDNVDADKVMITNEEEIKTTNPAATESYGQVATNHQSAQAQAQTGWVQNQGILPGMVWQDRDVYLQGPIWAKIPHTDGNFHPSPLMGGFGMKHPPPQILIKNTPVPADPPTAFNKDKLNSFITQYSTGQVSVEIEWELQKENSKRWNPEIQHTSNYYKSNNVEFAVNTEGVYSEPRPIGTRYLTRNL

SEQ ID NO: 625 - protein, 736 aa, Artificial Sequence
  Description of Artificial Sequence: Synthetic polypeptide
MAADGYLPDWLEDNLSEGIREWWALKPGAPQPKANQQHQDNARGLVLPGYKYLGPGNGLDKGEPVNAADAAALEHDKAYDQQLKAGDNPYLKYNHADAEFQERLKEDTSFGGNLGRAVFQAKKRLLEPLGLVEEAAKTAPGKKRPVEQSPQEPDSSAGIGKSGAQPAKKRLNFGQTGDTESVPDPQPIGEPPAAPSGVGSLTMASGGGAPVADNNEGADGVGSSSGNWHCDSQWLGDRVITTSTRTWALPTYNNHLYKQISNSTSGGSSNDNAYFGYSTPWGYFDFNRFHCHFSPRDWQRLINNNWGFRPKRLNFRLFNIQVKEVTDNNGVKTIANNLTSTVQVFTDSDYQLPYVLGSAHEGCLPPFPADVFMIPQYGYLTLNDGSQAVGRSSFYCLEYFPSQMLRTGNNFQFSYEFENVPFHSSYAHSQSLDRLMNPLIDQYLYYLSKTINGSGQNQQTLKFSVAGPSNMAVQGRNYIPGPSYRQQRVSTTVTQNNNSEFAWPGASSWALNGRNSLMNPGPAMASHKEGEDRFFPLSGSLIFGKQGTGRDNVDADKVMITNEEEIKTTNPVATESYGQVATNHQSAQAQAQTGWVQSQGILPGMVWQDRDVYLQGPIWAKIPHTDGNFHPSPLMGGFGMKHPPPQILIKNTPVPADPPTAFNKDKLNSFITQYSTGQVSVEIEWELQKENSKRWNPEIQYTSNYYKSNNVEFAVNTEGVYSEPRPIGTRYLTRNL

SEQ ID NO: 626 - DNA, 2205 bp, Artificial Sequence
  Description of Artificial Sequence: Synthetic polynucleotide
atggctgccgatggttatcttccagattggctcgaggacaaccttagtgaaggaattcgcgagtggtgggctttgaaacctggagcccctcaacccaaggcaaatcaacaacatcaagacaacgcccgaggtcttgtgcttccgggttacaaataccttggacccggcaacggactcgacaagggggagccggtcaacgcagcagacgcggcggccctcgagcacgacaaggcctacgaccagcagctcaaggccggagacaacccgtacctcaagtacaaccacgccgacgccgagttccaggagcggctcaaagaagatacgtcttttgggggcaacctcgggcgagcagtcttccaggccaaaaagaggcttcttgaacctcttggtctggttgaggaagcggctaagacggctcctggaaagaagaggcctgtagagcagtctcctcaggaaccggactcctccgcgggtattggcaaatcgggtgcacagcccgctaaaaagagactcaatttcggtcagactggcgacacagagtcagtcccagaccctcaaccaatcggagaacctcccgcagccccctcaggtgtgggatctcttacaatggcttcaggtggtggcgcaccagtggcagacaataacgaaggtgccgatggagtgggtagttcctcgggaaattggcattgcgattcccaatggctgggggacagagtcatcaccaccagcacccgaacctgggccctgcccacctacaacaatcacctctacaagcaaatctccaacagcacatctggaggatcttcaaatgacaacgcctacttcggctacagcaccccctggaggtattttgacttcaacagattccactgccacttctcaccacgtgactggcagcgactcatcaacaactggggattccggcctaagcgactcaacttcaagctcttcaacattcaggtcaaagaggttacggacaacaatggagtcaagaccatcgccaataaccttaccagcacggtccaggccttcacggactcagactatcagctcccgtacgtgctcgggtcggctcacgagggctgcctcccgccgttcccagcggacgttttcatgattcctcagtacgggtatctgacgcttaatgatggaagccaggccgtgggtcgttcgtccttttactgcctggaatatttcccgtcgcaaatgctaagaacgggtaacaacttccagttcagctacgagtttgagaacgtacctttccatagcagctacgctcacagccaaagcctggaccgactaatgaatccactcatcgaccaatacttgtactatctctcaaagactattaacggttctggacagaatcaacaaacgctaaaattcagtgtggccggacccagcaacatggctgtccagggaagaaactacatacctggacccagctaccgacaacaacgtgtctcaaccactgtgactcaaaacaacaacagcgaatttgcttggcctggagcttcttcttgggctctcaatggacgtaatagcttgatgaatcctggacctgctatggccagccacaaagaaggagaggaccgtttctttcctttgtctggatctttaatttttggcaaacaaggaactggaagagacaacgtggatgcggacaaagtcatgataaccaacgaagaagaaattaaaactactaacccggtagcaacggagtcctatggacaagtggccacaaaccaccagagtgcccaagcacaggcgcagaccggctgggttcaaaaccaaggaatacttccgggtatggtttggcaggacagagatgtgtacctgcaaggacccatttgggccaaaattcctcacacggacggcaactttcacccttctccgctgatgggagggtttggaatgaagcacccgcctcctcagatcctcatcaaaaacacacctgtacctgcggatcctccaacggccttcaacaaggacgagctgaactctttcatcacccagtattctactggccaagtcagcgtggagatcgagtgggagctgcagaaggaaaacagcaagcgctggaacccggagatccagtacacttccaactattacaagtctaataatgttgaatttgctgttaatactgaaggtgtatatagtgaaccccgccccattggcaccagatacctgactcgtaatctg

SEQ ID NO: 627 - protein, 735 aa, Artificial Sequence
  Description of Artificial Sequence: Synthetic polypeptide
MAADGYLPDWLEDNLSEGIREWWALKPGAPQPKANQQHQDNARGLVLPGYKYLGPGNGLDKGEPVNAADAAALEHDKAYDQQLKAGDNPYLKYNHADAEFQERLKEDTSFGGNLGRAVFQAKKRLLEPLGLVEEAAKTAPGKKRPVEQSPQEPDSSAGIGKSGAQPAKKRLNFGQTGDTESVPDPQPIGEPPAAPSGVGSLTMASGGGAPVADNNEGADGVGSSSGNWHCDSQWLGDRVITTSTRTWALPTYNNHLYKQISNSTSGGSSNDNAYFGYSTPWRYFDFNRFHCHFSPRDWQRLINNWGFRPKRLNFKLFNIQVKEVTDNNGVKTIANNLTSTVQAFTDSDYQLPYVLGSAHEGCLPPFPADVFMIPQYGYLTLNDGSQAVGRSSFYCLEYFPSQMLRTGNNFQFSYEFENVPFHSSYAHSQSLDRLMNPLIDQYLYYLSKTINGSGQNQQTLKFSVAGPSNMAVQGRNYIPGPSYRQQRVSTTVTQNNNSEFAWPGASSWALNGRNSLMNPGPAMASHKEGEDRFFPLSGSLIFGKQGTGRDNVDADKVMITNEEEIKTTNPVATESYGQVATNHQSAQAQAQTGWVQNQGILPGMVWQDRDVYLQGPIWAKIPHTDGNFHPSPLMGGFGMKHPPPQILIKNTPVPADPPTAFNKDELNSFITQYSTGQVSVEIEWELQKENSKRWNPEIQYTSNYYKSNNVEFAVNTEGVYSEPRPIGTRYLTRNL

SEQ ID NO: 628 - DNA, 2205 bp, Artificial Sequence
  Description of Artificial Sequence: Synthetic polynucleotide
atggctgccgatggttatcttccagattggctcgaggacaaccttagtgaaggaattcgcgagtggtgggctttgaaacctggagcccctcaacccaaggcaaatcaacaacatcaagacaacgctcgaggtcttgtgcttccgggttacaaataccttggacccggcaacggactcgacaagggggagccggtcaacgcagcagacgcggcggccctcgagcacgacaaggcctacgaccagcagctcaaggccggagacaacccgtacctcaagtacaaccacgccgacgccgagttccaggagcggctcaaagaagatacgtcttttgggggcaacctcgggcgagcagtcttccaggacaaaaagaggcttcttgaacctcttggtctggttgaggaagcggctaagacggctcctggaaagaagaggcctgtagagcagtctcctcaggaaccggactcctccgcgggtattggcaaatcgggtgcacagcccgctaaaaagagactcaatttcggtcagactggcgacacagagtcagtcccagaccctcaaccaatcggagaacctcccgcagccccctcaggtgtgggatctcttacaatggcttcaggtggtggcgcaccagtggcagacaataacgaaggtgccgatggagtgggtagttcctcgggaaattggcattgcgattcccaatggctgggggacagagtcatcaccaccagcacccgaacctgggccctgcccacctacaacaatcacctctacaagcaaatctccaacagcacatctggaggatcttcaaatgacaacgcctacttcggctacagcaccccctgggggtattttgacttcaacagattccactgccacttctcaccacgtgactggcagcgactcatcaacaactggggattccggcctaagcgactcaacttcaagctcttcaacattcaggtcaaagaggttacggacaacaatggagtcaagaccatcgccaataaccttaccagcacggtccaggtcttcacggactcagactatcagctcccgtacgtgctcgggtcggctcacgagggctgcctcccgccgttcccagcggacgttttcatgattcctcagtacgggtatctgacgcttaatgatggaagccaggccgtgggtcgttcgtccttttactgcctggaatatttcccgtcgcaaatgctaagaacgggtaacaacttccaattcagctacgagtttgagaacgtacctttccatagcagctacgctcacagccaaagcctggaccgactaatgaatccactcatcgaccaatacttgtactatctctcaaagactattaacggttctggacagaatcaacaaacgctaaaattcagtgtggccggacccagcaacatggctgtccagggaagaaactacatacctggacccagctaccgacaacaacgtgtctcaaccactgtgactcaaaacaacaacagcgaatttgcttggcctggagcttcttcttgggctctcaatggacgtaatagcttgatgaatcctggacctgctatggccagccacaaagaaggagaggaccgtttctttcctttgtctggatctttaatttttggcaaacaaggaactggaagagacaacgtggatgcggacaaagtcatgataaccaacgaagaagaaattaaaactactaacccggtagcaacggagtcctatggacaagtggccacaaaccaccagagtgcccaagcacaggcgcagaccggctgggttcaaaaccaaggaatacttccgggtatggtttggcaggacagagatgtgtacctgcaaggacccatttgggccaaaattcctcacacggacggcaactttcacccttctccgctgatgggagggtttggaatgaagcacccgcctcctcagatcctcatcaaaaacacacctgtacctgcggatcctccaacggccttcaacaaggacaagctgaactctttcatcacccagtattctactggccaagtcagcgtggagatcgagtgggagctgcagaaggaaaacagcaagcgctggaacccggagatccagtacacttccaactattacaagtctaataatgttgaatttgctgttaatactgaaggtgtatatagtgaaccccgccccattggcaccagatacctgactcgtaatctg

SEQ ID NO: 629 - protein, 735 aa, Artificial Sequence
  Description of Artificial Sequence: Synthetic polypeptide
MAADGYLPDWLEDNLSEGIREWWALKPGAPQPKANQQHQDNARGLVLPGYKYLGPGNGLDKGEPVNAADAAALEHDKAYDQQLKAGDNPYLKYNHADAEFQERLKEDTSFGGNLGRAVFQDKKRLLEPLGLVEEAAKTAPGKKRPVEQSPQEPDSSAGIGKSGAQPAKKRLNFGQTGDTESVPDPQPIGEPPAAPSGVGSLTMASGGGAPVADNNEGADGVGSSSGNWHCDSQWLGDRVITTSTRTWALPTYNNHLYKQISNSTSGGSSNDNAYFGYSTPWGYFDFNRFHCHFSPRDWQRLINNWGFRPKRLNFKLFNIQVKEVTDNNGVKTIANNLTSTVQVFTDSDYQLPYVLGSAHEGCLPPFPADVFMIPQYGYLTLNDGSQAVGRSSFYCLEYFPSQMLRTGNNFQFSYEFENVPFHSSYAHSQSLDRLMNPLIDQYLYYLSKTINGSGQNQQTLKFSVAGPSNMAVQGRNYIPGPSYRQQRVSTTVTQNNNSEFAWPGASSWALNGRNSLMNPGPAMASHKEGEDRFFPLSGSLIFGKQGTGRDNVDADKVMITNEEEIKTTNPVATESYGQVATNHQSAQAQAQTGWVQNQGILPGMVWQDRDVYLQGPIWAKIPHTDGNFHPSPLMGGFGMKHPPPQILIKNTPVPADPPTAFNKDKLNSFITQYSTGQVSVEIEWELQKENSKRWNPEIQYTSNYYKSNNVEFAVNTEGVYSEPRPIGTRYLTRNL

SEQ ID NO: 630 - DNA, 2208 bp, Artificial Sequence
  Description of Artificial Sequence: Synthetic polynucleotide
atggctgccgatggttatcttccagattggctcgaggacaaccttagtgaaggaattcgcgagtggtgggctttgaaacctggagcccctcaacccaaggcaaatcaacaacatcaagacaacgctcgaggtcttgtgcttccgggttacaaataccttggacccggcaacggactcgacaagggggagccggtcaacgcagcagacgcggcggccctcgagcacgacaaggcctacgaccagcagctcaaggccggagacaacccgtacctcaagtacaaccacgccgacgccgagttccaggagcggctcaaagaagatacgtcttttgggggcaacctcgggcgagcagtcttccaggccaaaaagaggcttcttgaacctcttggtctggttgaggaagcggctaagacggctcctggaaagaagaggcctgtagagcagtctcctcaggaaccggactcctccgcgggtattggcaaatcgggtgcacagcccgctaaaaagagactcaatttcggtcagactggcgacacagagtcagtcccagaccctcaaccaatcggagaacctcccgcagccccctcaggtgtgggatctcttacaatggcttcaggtggtggcgcaccagtggcagacaataacgaaggtgccgatggagtgggtagttcctcgggaaattggcattgcgattcccaatggctgggggacagagccatcaccaccagcacccgaacctgggccctgcccacctacaacaatcacctctacaagcaaatctccaacagcacatctggaggatcttcaaatgacaacgcctacttcggctacagcaccccctgggggtattttgacttcaacagattccactgccacttctcaccacgtgactggcagcggctcatcaacaacaactggggattccggcctaagcgactcaacttcaagctcttcaacattcaggtcaaagaggttacggacaacaatggagtcaagaccatcgccaataaccttaccagcacggtccaggtcttcacggactcagactatcagctcccgtacgtgctcgggtcggctcacgagggctgcctcccgccgttcccagcggacgttttcatgattcctcagtacgggtatctgacgcttaatgatggaagccaggccgtgggtcgttcgtccttttactgcctggaatatttcccgtcgcaaatgctaagaacgggtaacaacttccagttcagctacgagtttgagaacgtacctttccatagcagctacgctcacagccaaagcctggaccgactaatgaatccactcatcgaccaatacttgtactatctctcaaagactattaacggttctggacagaatcaacaaacgctaaaattcagtgtggccggacccagcaacatggctgtccagggaagaaactacatacctggacccagctaccgacaacaacgtgtctcaaccactgtgactcaaaacaacaacagcgaatttgcttggcctggagcttcttcttgggctctcaatggacgtaatagcttgatgaatcctggacctgctatggccagccacaaagaaggagaggaccgtttctttcctttgtctggatctttaatttttggcaaacaaggaactggaagagacaacgtggatgcggacaaagtcatgacaaccaacgaagaagaaattaaaactactaacccggtagcaacggagtcctatggacaagtggccacaaaccaccagagtgcccaagcacaggcgcagaccggctgggttcaaaaccaaggaatacttccgggtatggtttggcaggacagagatgtgtacctgcaaggacccatttgggccaaaattcctcacacggacggcaactttcacccttctccgctgatgggagggtttggaatgaagcacccgcctcctcagatcctcatcaaaaacacacctgtacctgcggatcctccaacggccttcaacaaggacaagctgaactctttcatcacccagtattctactggccaagtcagcgtggagatcgagtgggagctgcagaaggaaaacagcaagcgctggaacccggagatccagtacacttccaactattacaagtctaataatgttgaatttgctgttaatactgaaggtgtatatagtgaaccccgccccattggcaccagatacctgactcgtaatctg

SEQ ID NO: 631 - protein, 736 aa, Artificial Sequence
  Description of Artificial Sequence: Synthetic polypeptide
MAADGYLPDWLEDNLSEGIREWWALKPGAPQPKANQQHQDNARGLVLPGYKYLGPGNGLDKGEPVNAADAAALEHDKAYDQQLKAGDNPYLKYNHADAEFQERLKEDTSFGGNLGRAVFQAKKRLLEPLGLVEEAAKTAPGKKRPVEQSPQEPDSSAGIGKSGAQPAKKRLNFGQTGDTESVPDPQPIGEPPAAPSGVGSLTMASGGGAPVADNNEGADGVGSSSGNWHCDSQWLGDRAITTSTRTWALPTYNNHLYKQISNSTSGGSSNDNAYFGYSTPWGYFDFNRFHCHFSPRDWQRLINNNWGFRPKRLNFKLFNIQVKEVTDNNGVKTIANNLTSTVQVFTDSDYQLPYVLGSAHEGCLPPFPADVFMIPQYGYLTLNDGSQAVGRSSFYCLEYFPSQMLRTGNNFQFSYEFENVPFHSSYAHSQSLDRLMNPLIDQYLYYLSKTINGSGQNQQTLKFSVAGPSNMAVQGRNYIPGPSYRQQRVSTTVTQNNNSEFAWPGASSWALNGRNSLMNPGPAMASHKEGEDRFFPLSGSLIFGKQGTGRDNVDADKVMTTNEEEIKTTNPVATESYGQVATNHQSAQAQAQTGWVQNQGILPGMVWQDRDVYLQGPIWAKIPHTDGNFHPSPLMGGFGMKHPPPQILIKNTPVPADPPTAFNKDKLNSFITQYSTGQVSVEIEWELQKENSKRWNPEIQYTSNYYKSNNVEFAVNTEGVYSEPRPIGTRYLTRNL

SEQ ID NO: 632 - DNA, 2205 bp, Artificial Sequence
  Description of Artificial Sequence: Synthetic polynucleotide
atggctgccgatggttatcttccagattggctcgaggacactctctctgaaggaataagacagtggtggaagctcaaacctggcccaccaccaccaaagcccgcagagcggcataaggacgacagcaggggtcttgtgcttcctgggtacaagtacctcggacccttcaacggactcgacaagggagagccggtcaacgaggcagacgccgcggccctcgagcacgacaaagcctacgaccggcagctcgacagcggagacaacccgtacctcaagtacaaccacgccgacgcggagtttcaggagcgccttaaagaagatacgtcttttgggggcaacctcggacgagcagtcttccaggcgaaaaagagggttcttgaacctctgggcctggttgaggaacctgttaagacggctccgggaaaaaagaggccggtagagcactctcctgtggagccagactcctcctcgggaaccggaaaggcgggccagcagcctgcaagaaaaagattgaattttggtcagactggagacgcagactcagtacctgacccccagcctctcggacagccaccagcagccccctctggtctgggaactaatacgatggctacaggcagtggcgcaccaatggcagacaataacgagggcgccgacggagtgggtaattcctcgggaaattggcattgcgattccacatggatgggcgacagagtcatcaccaccagcacccgaacctgggccctgcccacctacaacaaccacctctacaaacaaatttccagccaatcaggagcctcgaacgacaatcactactttggctacagcaccccttgggggtattttgacttcaacagattccactgccacttttcaccacgtgactggcaaagactcatcaacaacaactggggattccgacccaagagactcaacttcaagctctttaacattcaagtcaaagaggtcacgcagaatgacggtacgacgacgattgccaataaccttaccagcacggttcaggtgtttactgactcggagtaccagctcccgtacgtcctcggctcggcgcatcaaggatgcctcccgccgttcccagcagacgtcttcatggtgccacagtatggatacctcaccctgaacaacgggagtcaggcagtaggacgctcttcattttactgcctggagtactttccttctcagatgctgcgtaccggaaacaactttaccttcagctacacttttgaggacgttcctttccacagcagctacgctcacagccagagtctggaccgtctcatgaatcctctcatcgaccagtacctgtattacttgagcagaacaaacactccaagtggaaccaccacgcagtcaaggcttcagttttctcgggccggagcgagtgacattcgggaccagtctaggaactggcttcctggaccctgttaccgccagcagcgagtatcaaagacatctgcggataacaacaacagtgaatactcgtggactggagctaccaagtaccacctcaatggcagagactctctggtgaatccgggcccggccatggcaagccacaaggacgatgaagaaaagttttttcctcagagcggggttctcatctttgggaagcaaggctcagagaaaacaaatgtggacattgaaaaggtcatgattacagacgaagaggaaatcaggacaaccaatcccgtggctacggagcagtatggttctgtatctaccaacctccagagaggcaacagacaagcagctaccgcagatgtcaacacacaaggcgttcttccaggcatggtctggcaggacagagatgtgtaccttcaggggcccatctgggcaaagattccacacacggacggacattttcacccctctcccctcatgggtggattcggacttaaacaccctcctccacagattctcatcaagaacaccccggtacctgcgaatccttcgaccaccttcagtgcggcaaagtttgcttccttcatcacacagtactccacgggacaggtcagcgtggagatcgagtgggagctgcagaaggaaaacagcaaacgctggaatcccgaaattcagtacacttccaactacaacaagtctgttaatgtggactttactgtggacactaatggcgtgtattcagagcctcgccccattggcaccagatacctgactcgtaatctg

SEQ ID NO: 633 - protein, 735 aa, Artificial Sequence
  Description of Artificial Sequence: Synthetic polypeptide
MAADGYLPDWLEDTLSEGIRQWWKLKPGPPPPKPAERHKDDSRGLVLPGYKYLGPFNGLDKGEPVNEADAAALEHDKAYDRQLDSGDNPYLKYNHADAEFQERLKEDTSFGGNLGRAVFQAKKRVLEPLGLVEEPVKTAPGKKRPVEHSPVEPDSSSGTGKAGQQPARKRLNFGQTGDADSVPDPQPLGQPPAAPSGLGTNTMATGSGAPMADNNEGADGVGNSSGNWHCDSTWMGDRVITTSTRTWALPTYNNHLYKQISSQSGASNDNHYFGYSTPWGYFDFNRFHCHFSPRDWQRLINNNWGFRPKRLNFKLFNIQVKEVTQNDGTTTIANNLTSTVQVFTDSEYQLPYVLGSAHQGCLPPFPADVFMVPQYGYLTLNNGSQAVGRSSFYCLEYFPSQMLRTGNNFTFSYTFEDVPFHSSYAHSQSLDRLMNPLIDQYLYYLSRTNTPSGTTTQSRLQFSRAGASDIRDQSRNWLPGPCYRQQRVSKTSADNNNSEYSWTGATKYHLNGRDSLVNPGPAMASHKDDEEKFFPQSGVLIFGKQGSEKTNVDIEKVMITDEEEIRTTNPVATEQYGSVSTNLQRGNRQAATADVNTQGVLPGMVWQDRDVYLQGPIWAKIPHTDGHFHPSPLMGGFGLKHPPPQILIKNTPVPANPSTTFSAAKFASFITQYSTGQVSVEIEWELQKENSKRWNPEIQYTSNYNKSVNVDFTVDTNGVYSEPRPIGTRYLTRNL

SEQ ID NO: 634 - DNA, 2208 bp, Artificial Sequence
  Description of Artificial Sequence: Synthetic polynucleotide
atggctgccgatggttatcttccagattggctcgaggacaacctctctgagggcattcgcgagtggtgggacttgaaacctggagccccgaagcccaaagccaaccagcaaaagcaggacgacggccggggtctggtgcttcctggctacaagtacctcggacccttcaacggactcgacaagggggagcccgtcaacgcggcggacgcagcggccctcgagcacgacaaggcctacgaccagcagctcaaagcgggtgacaatccgtacctgcggtataaccacgccgacgccgagtttcaggagcgtctgcaagaagatacgtcttttgggggcaacctcgggcgagcagtcttccaggccaagaagcgggttctcgaacctctcggtctggttgaggaaggcgctaagacggctcctggaaagaaacgtccggtagagcagtcgccacaagagccagactcctcctcgggcatcggcaagacaggccagcagcccgctaaaaagagactcaattttggtcagactggcgactcagagtcagtccccgatccacaacctctcggagaacctccagcaacccccgctgctgtggggcctactacaatggcttcaggcggtggcgcaccaatggcagacaataacgaaggcgtcgacggagtgggtaatgcctcaggaaattggcattgcgattccacatggctgggcgacagagtcatcaccaccagcacccgcacctgggccttgcccacctacaataaccacctctacaagcaaatctccagtgcttcaacgggggccagcaacgacaaccactacttcggctacagcaccccctgggggtattttgatttcaacagattccactgccacttttcaccacgtgactggcagcgactcatcaacaacaattggggattccggcccaagagactcaacttcaaactcttcaacatccaagtcaaggaggtcacgacgaatgatggcgttacaaccatcgctaataaccttaccagcacggttcaagtcttctcggactcggagtaccagcttccgtacgtcctcggctctgcgcaccagggctgcctccctccgttcccggcggacgtgttcatgattccgcaatacggctacctgacgctcaacaatggcagccaagccgtgggacgttcatccttttactgcctggaatatttcccttctcagatgctgagaacgggcaacaactttaccttcagctacacctttgaggaagtgcctttccacagcagctacgcgcacagccagagcctggaccggctgatgaatcctctcatcgaccaatacctgtattacctgaacagaactcaaaatcagtccggaagtgcccaaaacaaggacttgctgtttagccgtgggtctccagctggcatgtctgttcagcccaaaaactggctacctggaccctgttatcggcagcagcgcgtttctaaaacaaaaacagacaacaacaacagcaattttacctggactggtgcttcaaaatataacctcaatgggcgtgaatccatcatcaaccctggcactgctatggcctcacacaaagacgacgaagacaagttctttcccatgagcggtgtcatgatttttggaaaagagagcgccggagcttcaaacactgcattggacaatgtcatgattacagacgaagaggaaattaaagccactaaccctgtggccaccgaaagatttgggaccgtggcagtcaatttccagagcagcagcacagaccctgcgaccggagatgtgcatgctatgggagcattacctggcatggtgtggcaagatagagacgtgtacctgcagggtcccatttgggccaaaattcctcacacagatggacactttcacccgtctcctcttatgggcggctttggactcaagaacccgcctcctcagatcctcatcaaaaacacgcctgttcctgcgaatcctccggcggagttttcagccacaaagcttgcttcattcatcacccaatactccacaggacaagtgagtgtggaaattgaatgggagctgcagaaagaaaacagcaagcgctggaatcccgaagtgcagtacacatccaattatgcaaaatctgccaacgttgattttactgtggacaacaatggactttatactgagcctcgccccattggcacccgttaccttacccgtcccctg

SEQ ID NO: 635 - protein, 736 aa, Artificial Sequence
  Description of Artificial Sequence: Synthetic polypeptide
MAADGYLPDWLEDNLSEGIREWWDLKPGAPKPKANQQKQDDGRGLVLPGYKYLGPFNGLDKGEPVNAADAAALEHDKAYDQQLKAGDNPYLRYNHADAEFQERLQEDTSFGGNLGRAVFQAKKRVLEPLGLVEEGAKTAPGKKRPVEQSPQEPDSSSGIGKTGQQPAKKRLNFGQTGDSESVPDPQPLGEPPATPAAVGPTTMASGGGAPMADNNEGVDGVGNASGNWHCDSTWLGDRVITTSTRTWALPTYNNHLYKQISSASTGASNDNHYFGYSTPWGYFDFNRFHCHFSPRDWQRLINNNWGFRPKRLNFKLFNIQVKEVTTNDGVTTIANNLTSTVQVFSDSEYQLPYVLGSAHQGCLPPFPADVFMIPQYGYLTLNNGSQAVGRSSFYCLEYFPSQMLRTGNNFTFSYTFEEVPFHSSYAHSQSLDRLMNPLIDQYLYYLNRTQNQSGSAQNKDLLFSRGSPAGMSVQPKNWLPGPCYRQQRVSKTKTDNNNSNFTWTGASKYNLNGRESIINPGTAMASHKDDEDKFFPMSGVMIFGKESAGASNTALDNVMITDEEEIKATNPVATERFGTVAVNFQSSSTDPATGDVHAMGALPGMVWQDRDVYLQGPIWAKIPHTDGHFHPSPLMGGFGLKNPPPQILIKNTPVPANPPAEFSATKLASFITQYSTGQVSVEIEWELQKENSKRWNPEVQYTSNYAKSANVDFTVDNNGLYTEPRPIGTRYLTRPL

SEQ ID NO: 636 - DNA, 2208 bp, Artificial Sequence
  Description of Artificial Sequence: Synthetic polynucleotide
atggctgccgatggttatcttccagattggctcgaggacaacctctctgagggcattcgcgagtggtgggacttgaaacctggagccccgaagcccaaagccaaccagcaaaagcaggacgacggccggggtctggtgcttcctggctacaagtacctcggacccttcaacggactcgacaagggggagcccgtcaacgcggcggacgcagcggccctcgagcacgacaaggcctacgaccagcagctcaaagcgggtgacaatccgtacctgcggtataaccacgccgacgccgagtttcaggagcgtctgcaagaagatacgtcttttgggggcaacctcgggcgagcagtcttccaggccaagaagcgggttctcgaacctctcggtctggttgaggaaggcgctaagacggctcctggaaagagacgtccggtagagcagtcgccacaagagccagactcctcctcgggcatcggcaagacaggccagcagcccgctaaaaagagactcaattttggtcagactggcgactcagagtcagtccccgatccacaacctctcggagaacctccagcaacccccgctgctgtgggacctactacaatggcttcaggcggtggcgcaccaatggcagacaataacgaaggcgccgacggagtgggtaatgcctcaggaaattggcattgcgattccacatggctgggcgacagagtcatcaccaccagcacccgcacctgggccttgcccacctacaataaccacctctacaagcaaatctccagtgcttcaacgggggccagcaacgacaaccactacttcggctacagcaccccctgggggtattttgatttcaacagattccactgccacttttcaccacgtgactggcagcgactcatcaacaacaattggggattccggcccaagagactcaacttcaaactcttcaacatccaagtcaaggaggtcacgacgaatgatggcgtcacaaccatcgctaataaccttaccagcacggttcaagtcttctcggactcggagtaccagcttccgtacgtcctcggctctgcgcaccagggctgcctccctccgttcccggcggacgtgttcatgattccgcaatacggctacctgacgctcaacaatggcagccaagccgtgggacgttcatccttttactgcctggaatatttcccttctcagatgctgagaacgggcaacaactttaccttcagctacacctttgaggaagtgcctttccacagcagctacgcgcacagccagagcctggaccggctgatgaatcctctcatcgaccaatacctgtattacctgaacagaactcaaaatcagtccggaagtgcccaaaacaaggacttgctgtttagccgtgggtctccagctggcatgtctgttcagcccaaaaactggctacctggaccctgttatcggcagcagcgcgtttctaaaacaaaaacagacaacaacaacagcaattttacctggactggtgcttcaaaatataacctcaatgggcgtgaatccatcatcaaccctggcactgctatggcctcacacaaagacgacgaagacaagttctttcccatgagcggtgtcatgatttttggaaaagagagcgccggagcttcaaacactgcattggacaatgtcatgattacagacgaagaggaaattaaagccactaaccctgtggccaccgaaagatttgggaccgtggcagtcaatttccagagcagcagcacagaccctgcgaccggagatgtgcatgctatgggagcattacctggcatggtgtggcaagatagagacgtgtacctgcagggtcccatttgggccaaaattcctcacacagatggacactttcacccgtctcctcttatgggcggctttggactcaagaacccgcctcctcagatcctcatcaaaaacacgcctgttcctgcgaatcctccggcggagttttcagctacaaagtttgcttcgttcatcacccaatactccacaggacaagtgagtgtggaaattgaatgggagctgcagaaagaaaacagcaagcgctggaatcccgaagtgcagtacacatccaattatgcaaaatctgccaacgttgattttactgtggacaacaatggactttatactgagcctcgccccattggcacccgttaccttacccgtcccctg

SEQ ID NO: 637 - protein, 736 aa, Artificial Sequence
  Description of Artificial Sequence: Synthetic polypeptide
MAADGYLPDWLEDNLSEGIREWWDLKPGAPKPKANQQKQDDGRGLVLPGYKYLGPFNGLDKGEPVNAADAAALEHDKAYDQQLKAGDNPYLRYNHADAEFQERLQEDTSFGGNLGRAVFQAKKRVLEPLGLVEEGAKTAPGKRRPVEQSPQEPDSSSGIGKTGQQPAKKRLNFGQTGDSESVPDPQPLGEPPATPAAVGPTTMASGGGAPMADNNEGADGVGNASGNWHCDSTWLGDRVITTSTRTWALPTYNNHLYKQISSASTGASNDNHYFGYSTPWGYFDFNRFHCHFSPRDWQRLINNNWGFRPKRLNFKLFNIQVKEVTTNDGVTTIANNLTSTVQVFSDSEYQLPYVLGSAHQGCLPPFPADVFMIPQYGYLTLNNGSQAVGRSSFYCLEYFPSQMLRTGNNFTFSYTFEEVPFHSSYAHSQSLDRLMNPLIDQYLYYLNRTQNQSGSAQNKDLLFSRGSPAGMSVQPKNWLPGPCYRQQRVSKTKTDNNNSNFTWTGASKYNLNGRESIINPGTAMASHKDDEDKFFPMSGVMIFGKESAGASNTALDNVMITDEEEIKATNPVATERFGTVAVNFQSSSTDPATGDVHAMGALPGMVWQDRDVYLQGPIWAKIPHTDGHFHPSPLMGGFGLKNPPPQILIKNTPVPANPPAEFSATKFASFITQYSTGQVSVEIEWELQKENSKRWNPEVQYTSNYAKSANVDFTVDNNGLYTEPRPIGTRYLTRPL

SEQ ID NO: 638 - DNA, 2175 bp, Artificial Sequence
  Description of Artificial Sequence: Synthetic polynucleotide
atgtcttttgttgatcaccctccagattggttggaagaagttggtgaaggtcttcgcgagtttttgggccttgaagcgggcccaccgaaaccaaaacccaatcagcagcatcaagatcaagcccgtggtcttgtgctgcctggttataactatctcggacccggaaacggtctcgatcgaggagagcctgtcaacagggcagacgaggtcgcgcgagagcacgacatctcgtacaacgagcagcttgaggcgggagacaacccctacctcaagtacaaccacgcggacgccgagtttcaggagaagctcgccgacgacacatccttcgggggaaacctcggaaaggcagtctttcaggccaagaaaagggttctcgaaccttttggcctggttgaagagggtgctaagacggcccctaccggaaagcggatagacgaccactttccaaaaagaaagaaggcccggaccgaagaggactccaagccttccacctcgtcagacgccgaagctggacccagcggatcccagcagctgcaaatcccagcccaaccagcctcaagtttgggagctgatacaatgtctgcgggaggtggcggcccattgggcgacaataaccaaggtgccgatggagtgggcaatgcctcgggagattggcattgcgattccacgtggatgggggacagagtcgtcaccaagtccacccgaacctgggtgctgcccagctacaacaaccaccagtaccgagagatcaaaagcggctccgtcgacggaagcaacgccaacgcctactttggatacagcaccccctgggggtactttgactttaaccgcttccacagccactggagcccccgagactggcaaagactcatcaacaactactggggcttcagaccccggtccctcagagtcaaaatcttcaacattcaagtcaaagaggtcacggtgcaggactccaccaccaccatcgccaacaacctcacctccaccgtccaagtgtttacggacgacgactaccagctgccctacgtcgtcggcaacgggaccgagggatgcctgccggccttccctccgcaggtctttacgctgccgcagtacggttacgcgacgctgaaccgcgacaacacagaaaatcccaccgagaggagcagcttcttctgcctagagtactttcccagcaagatgctgagaacgggcaacaactttgagtttacctacaactttgaggaggtgcccttccactccagcttcgctcccagtcagaacctcttcaagctggccaacccgctggtggaccagtacttgtaccgcttcgtgagcacaaataacactggcggagtccagttcaacaagaacctggccgggagatacgccaacacctacaaaaactggttcccggggcccatgggccgaacccagggctggaacctgggctccggggtcaaccgcgccagtgtcagcgccttcgccgcgaccaataggatggagctcgagggcgcgagttaccaggtgcccccgcagccgaacggcatgaccaacaacctccagggcagcaacacctatgccctggagaacactatgatcttcaacagccagccggcgaacccgggcaccaccgccacgtacctcgagggcaacatgctcatcaccagcgagagcgagacgcagccggtgaaccgcgtggcgtacaacgtcggcgggcagatggccaccaacaaccagagctccaccactgcccccgcgaccggcacgtacaacctccaggaaatcgtgcccggcggcgtgtggatggagagggacgtgtacctccaaggacccatctgggccaagatcccagagacgggggcgcactttcacccctctccggccatgggcggattcggactcaaacacccaccgcccatgatgctcatcaagaacacgcctgtgcccggaaataccaccagcttctcggacgtgcccgtcagcagcttcatcacccagtacagcaccgggcaggtcaccgtggagatggagtgggagctcaagaaggaaaactccaagaggtggaacccagagatccagtacacaaacaactacaacgacccccagtttgtggactttgccccggacagcaccggggaatacagaaccaccagacctatcggaacccgataccttacccgacccctttaa

SEQ ID NO: 639 - protein, 724 aa, Artificial Sequence
  Description of Artificial Sequence: Synthetic polypeptide
MSFVDHPPDWLEEVGEGLREFLGLEAGPPKPKPNQQHQDQARGLVLPGYNYLGPGNGLDRGEPVNRADEVAREHDISYNEQLEAGDNPYLKYNHADAEFQEKLADDTSFGGNLGKAVFQAKKRVLEPFGLVEEGAKTAPTGKRIDDHFPKRKKARTEEDSKPSTSSDAEAGPSGSQQLQIPAQPASSLGADTMSAGGGGPLGDNNQGADGVGNASGDWHCDSTWMGDRVVTKSTRTWVLPSYNNHQYREIKSGSVDGSNANAYFGYSTPWGYFDFNRFHSHWSPRDWQRLINNYWGFRPRSLRVKIFNIQVKEVTVQDSTTTIANNLTSTVQVFTDDDYQLPYVVGNGTEGCLPAFPPQVFTLPQYGYATLNRDNTENPTERSSFFCLEYFPSKMLRTGNNFEFTYNFEEVPFHSSFAPSQNLFKLANPLVDQYLYRFVSTNNTGGVQFNKNLAGRYANTYKNWFPGPMGRTQGWNLGSGVNRASVSAFAATNRMELEGASYQVPPQPNGMTNNLQGSNTYALENTMIFNSQPANPGTTATYLEGNMLITSESETQPVNRVAYNVGGQMATNNQSSTTAPATGTYNLQEIVPGGVWMERDVYLQGPIWAKIPETGAHFHPSPAMGGFGLKHPPPMMLIKNTPVPGNTTSFSDVPVSSFITQYSTGQVTVEMEWELKKENSKRWNPEIQYTNNYNDPQFVDFAPDSTGEYRTTRPIGTRYLTRPL

SEQ ID NO: 640 - DNA, 2175 bp, Artificial Sequence
  Description of Artificial Sequence: Synthetic polynucleotide
atgtcttttgttgatcaccctccagattggttggaagaagttggtgaaggtcttcgcgagtttttgggccttgaagcgggcccaccgaaaccaaaacccaatcagcagcatcaagatcaagcccgtggtcttgtgctgcctggttataactatctcggacccggaaacggtctcgatcgaggagagcctgtcaacagggcagacgaggtcgcgcgagagcacgacatctcgtacaacgagcagcttgaggcgggagacaacccctacctcaagtacaaccacgcggacgccgagtttcaggagaagctcgccgacgacacatccttcgggggaaacctcggaaaggtagtctttcaggccaagaaaagggttctcgaaccttttggcctggttgaagagggtgctaagacggcccctaccggaaagcggatagacgaccactttccaaaaagaaagaaggcccggaccgaagaggactccaagccttccacctcgtcagacgccgaagctggacccagcggatcccagcagctgcaaatcccagcccaaccagcctcaagtttgggagctgatacaatgtctgcgggaggtggcggcccattgggcggcaataaccaaggtgccgatggagtgggcaatgcctcgggagattggcattgcgattccacgtggatgggggacagagtcgtcaccaagtccacccgaacctgggtgctgcccagctacaacaaccaccagtaccgagagatcaaaagcggctccgtcgacggaagcaacgccaacgcctactttggatacagcaccccctgggggtactttgactttaaccgcttccacagccactggggcccccgagactggcaaagactcatcaacaactactggggcttcagaccccggtccctcagagtcaaaatcttcaacattcaagtcaaagaggtcacggtgcaggactccaccaccaccatcgccaacaacctcacctccaccgtccaagtgtttacggacgacgactaccagctgccctacgtcgtcggcaacgggaccgagggatgcctgccggccttccctccgcaggtctttacgctgccgcagtacggttacgcgacgctgaaccgcgacaacacagaaaatcccaccgagaggagcagcttcttctgcctagagtactttcccagcaagatgctgagaacgggcaacaactttgagtttacctacaactttgaggaggtgcccttccactccagcttcgctcccagtcagaacctcttcaagctggccaacccgctggtggaccagtacttgtaccgcttcgtgagcacaaataacactggcggagtccagttcaacaagaacctggccgggagatacgccaacacctacaaaaactggttcccggggcccatgggccgaacccagggctggaacctgggctccggggtcaaccgcgccagtgtcagcgccctcgccacgaccaataggatggagctcgagggcgcgagttaccaggtgcccccgcagccgaacggcatgaccaacaacctccagggcagcaacacctatgccctggagaacactatgatcttcaacagccagccggcgaacccgggcaccaccgccacgtacctcgagggcaacatgctcatcaccagcgagagcgagacgcagccggtgaaccgcgtggcgtacaacgtcggcgggcagatggccaccaacaaccagagctccaccactgcccccgcgaccggcacgtacaacctccaggaaatcgtgcccggcagcgtgtggatggagagggacgtgtacctccaaggacccatctgggccaagatcccagagacgggggcgcactttcacccctctccggccatgggcggattcggactcaaacacccaccgcccatgatgctcatcaagaacacgcctgtgcccggaaatatcaccagcttctcggacgtgcccgtcagcagcttcatcacccagtacagcaccgggcaggtcaccgtggagatggagtgggagctcaagaaggaaaactccaagaggtggaacccagagatccagtacacaaacaactacaacgacccccagtttgtggactttgccccggacagcaccggggaatacagaaccaccagacctatcggaacccgataccttacccgacccctttaa

SEQ ID NO: 641 - protein, 724 aa, Artificial Sequence
  Description of Artificial Sequence: Synthetic polypeptide
MSFVDHPPDWLEEVGEGLREFLGLEAGPPKPKPNQQHQDQARGLVLPGYNYLGPGNGLDRGEPVNRADEVAREHDISYNEQLEAGDNPYLKYNHADAEFQEKLADDTSFGGNLGKVVFQAKKRVLEPFGLVEEGAKTAPTGKRIDDHFPKRKKARTEEDSKPSTSSDAEAGPSGSQQLQIPAQPASSLGADTMSAGGGGPLGGNNQGADGVGNASGDWHCDSTWMGDRVVTKSTRTWVLPSYNNHQYREIKSGSVDGSNANAYFGYSTPWGYFDFNRFHSHWGPRDWQRLINNYWGFRPRSLRVKIFNIQVKEVTVQDSTTTIANNLTSTVQVFTDDDYQLPYVVGNGTEGCLPAFPPQVFTLPQYGYATLNRDNTENPTERSSFFCLEYFPSKMLRTGNNFEFTYNFEEVPFHSSFAPSQNLFKLANPLVDQYLYRFVSTNNTGGVQFNKNLAGRYANTYKNWFPGPMGRTQGWNLGSGVNRASVSALATTNRMELEGASYQVPPQPNGMTNNLQGSNTYALENTMIFNSQPANPGTTATYLEGNMLITSESETQPVNRVAYNVGGQMATNNQSSTTAPATGTYNLQEIVPGSVWMERDVYLQGPIWAKIPETGAHFHPSPAMGGFGLKHPPPMMLIKNTPVPGNITSFSDVPVSSFITQYSTGQVTVEMEWELKKENSKRWNPEIQYTNNYNDPQFVDFAPDSTGEYRTTRPIGTRYLTRPL

SEQ ID NO: 642 - DNA, 2175 bp, Artificial Sequence
  Description of Artificial Sequence: Synthetic polynucleotide
atgtcttttgttgatcaccctccagattggttggaagaagttggtgaaggtcttcgcgagtttttgggccttgaagcgggcccaccgaaaccaaaacccaatcagcagcatcaagatcaagcccgtggtcttgtgctgcctggttataactatctcggacccggaaacggtctcgatcgaggagagcctgtcaacagggcagacgaggtcgcgcgagagcacgacatctcgtacaacgagcagcttgaggcgggagacaacccctacctcaagtacaaccacgcggacgccgagtttcaggagaagctcgccgacgacacatccttcgggggaaacctcggaaaggcagtctttcaggccaagaaaagggttctcgaaccttttggcctggttgaagagggtgctaagacggcccctaccggaaagcggatagacgaccactttccaaaaagaaagaaggcccggaccgaagaggactccaagccttccacctcgtcagacgccgaagctggacccagcggatcccagcagctgcaaatcccagcccaaccagcctcaagtttgggagctgatacaatgtctgcgggaggtggcggcccattgggcgacaataaccaaggtgccgatggagtgggcaatgcctcgggagattggcattgcgattccacgtggatgggggacagagtcgtcaccaagtccacccgaacctgggtgctgcccagctacaacaaccaccagtaccgagagatcaaaagcggctccgtcgacggaagcaacgccaacgcctactttggatacagcaccccctgggggtactttgactttaaccgcttccacagccactggagcccccgagactggcaaagactcatcaacaactactggggcttcagaccccggtccctcagagtcaaaatcttcaacattcaagtcaaagaggtcacggtgcaggactccaccaccaccatcgccaacaacctcacctccaccgtccaagtgtttacggacgacgactaccagctgccctacgtcgtcggcaacgggaccgagggatgcctgccggccttccctccgcaggtctttacgctgccgcagtacggttacgcgacgctgaaccgcgacaacacagaaaatcccaccgagaggagcagcttcttctgcctagagtactttcccagcaagatgctgagaacgggcaacaactttgagtttacctacaactttgaggaggtgcccttccactccagcttcgctcccagtcagaacctcttcaagctggccaacccgctggtggaccagtacttgtaccgcttcgtgagcacaaataacactggcggagtccagttcaacaagaacctggccgggagatacgccaacacctacaaaaactggttcccggggcccatgggccgaacccagggctggaacctgggctccggggtcaaccgcgccagtgtcagcgccttcgccacgaccaataggatggagctcgagggcgcgagttaccaggtgcccccgcagccgaacggcatgaccaacaacctccagggcagcaacacctatgccctggagaacactatgatcttcaacagccagccggcgaacccgggcaccaccgccacgtacctcgagggcaacatgctcatcaccagcgagagcgagacgcagccggtgaaccgcgtggcgtacaacgtcggcgggcagatggccaccaacaaccagagctccaccactgcccccgcgaccggcacgtacaacctccaggaaatcgtgcccggcagcgtgtggatggagagggacgtgtacctccaaggacccatctgagccaagatcccagagacgggggcgcactttcacccctctccggccatgggcggattcggactcaaacacccaccgcccatgatgctcatcaagaacacgcctgtgcccggaaatatcaccagcttctcggacgtgcccgtcagcagcttcatcacccagtacagcaccgggcaggtcaccgtggagatggagtgggagctcaagaaggaaaactccaagaggtggaacccagagatccagtacacaaacaactacaacgacccccagtttgtggactttgccccggacagcaccggggaatgcagaaccaccagacctatcggaacccgataccttacccgacccctttaa

SEQ ID NO: 643 - protein, 723 aa, Artificial Sequence
  Description of Artificial Sequence: Synthetic polypeptide
MSFVDHPPDWLEEVGEGLREFLGLEAGPPKPKPNQQHQDQARGLVLPGYNYLGPGNGLDRGEPVNRADEVAREHDISYNEQLEAGDNPYLKYNHADAEFQEKLADDTSFGGNLGKAVFQAKKRVLEPFGLVEEGAKTAPTGKRIDDHFPKRKKARTEEDSKPSTSSDAEAGPSGSQQLQIPAQPASSLGADTMSAGGGGPLGDNNQGADGVGNASGDWHCDSTWMGDRVVTKSTRTWVLPSYNNHQYREIKSGSVDGSNANAYFGYSTPWGYFDFNRFHSHWSPRDWQRLINNYWGFRPRSLRVKIFNIQVKEVTVQDSTTTIANNLTSTVQVFTDDDYQLPYVVGNGTEGCLPAFPPQVFTLPQYGYATLNRDNTENPTERSSFFCLEYFPSKMLRTGNNFEFTYNFEEVPFHSSFAPSQNLFKLANPLVDQYLYRFVSTNNTGGVQFNKNLAGRYANTYKNWFPGPMGRTQGWNLGSGVNRASVSAFATTNRMELEGASYQVPPQPNGMTNNLQGSNTYALENTMIFNSQPANPGTTATYLEGNMLITSESETQPVNRVAYNVGGQMATNNQSSTTAPATGTYNLQEIVPGSVWMERDVYLQGPIAKIPETGAHFHPSPAMGGFGLKHPPPMMLIKNTPVPGNITSFSDVPVSSFITQYSTGQVTVEMEWELKKENSKRWNPEIQYTNNYNDPQFVDFAPDSTGECRTTRPIGTRYLTRPL

SEQ ID NO: 644 - DNA, 2175 bp, Artificial Sequence
  Description of Artificial Sequence: Synthetic polynucleotide
atgtcttttgttgatcaccctccagattggttggaagaagttggtgaaggtcttcgcgagtttttgggccttgaagcgggcccaccgaaaccaaaacccaatcagcagcatcaagatcaagcccgtggtcttgtgctgcctggttataactatctcggacccggaaacggtctcgatcgaggagagcctgtcaacagggcagacgaggtcgcgcgagagcacgacatctcgtacaacgagcagcttgaggcgggagacaacccctacctcaagtacaaccacgcggacgccgagtttcaggagaagctcgccgacgacacatccttcgggggaaacctcggaaaggcagtctttcaggccaagaaaagggttctcgaaccttttggcctggttgaagagggtgctaagacggcccctaccggaaagcggatagacgaccactttccaaaaagaaagaaggcccggaccgaagaggactccaagccttccacctcgtcagacgccgaagctggacccagcggatcccagcagctgcaaatcccagcccaaccagcctcaagtttgggagctgatacaatgtctgcgggaggtggcggcccattgggcgacaataaccaaggtgccgatggagtgggcaatgcctcgggagattggcattgcgattccacgtggatgggggacagagtcgtcaccaagtccacccgaacctgggtgctgcccagctacaacaaccaccagtaccgagagatcaaaagcggctccgtcgacggaagcaacgccaacgcctactttggatacagcaccccctgggggtactttgactttaaccgcttccacagccactggagcccccgagactggcaaagactcatcaacaactactggggcttcagaccccggtccctcagagtcaaaatcctcaacattcaagtcaaagaggtcacggtgcaggactccaccaccaccatcgccaacaacctcacctccaccgtccaagtgtttacggacgacgactaccagctgccctacgtcgtcggcaacgggaccgagggatgcctgccggccttccctccgcaggtctttacgctgccgcagtacggttacgcgacgctgaaccgcgacaacacagaaaatcccaccgagaggagcagcttcttctgcctagagtactttcccagcaagatgctgagaacgggcaacaactttgagtttacctacaactttgaggaggtgcccttccactccagcttcgctcccagtcagaacctcttcaagctggccaacccgctggtgggccagtacttgtaccgcttcgtgagcacaaataacactggcggagtccagttcaacgagaacctggccgggagatacgccaacacctacaaaaactggttcccggggcccatgggccgaacccagggctggaacctgggctccggggtcaaccgcgccagtgtcagcgccttcgccacgaccaataggatggagctcgagggcgcgagttaccaggtgcccccgcagccgaacggcatgaccaacaacctccagggcagcaacacctatgccctggagaacactatgatcttcaacagccagccggcgaacccgggcaccaccgccacgtacctcgagggcaacatgctcatcaccagcgagagcgagacgcagccggtgaaccgcgtggcgtacaacgtcggcgggcagatggccaccaacaaccagagctccaccactgcccccgcgaccggcacgtacaacctccaggaaatcgtgcccggcagcgtgtggatggagagggacgtgtacctccaaggacccatctgggccaagatcccagagacgggggcgcactttcacccctctccggccatgggcggattcggactcaaacacccaccgcccatgatgctcatcaagaacacgcctgtgcccggaaatatcaccagcttctcggacgtgcccgtcagcagcttcatcacccagtacagcaccgggcaggccaccgtggagatggagtgggagctcaagaaggaaaactccaagaggtggaacccagagatccagtacacaaacaactacaacgacccccagtttgtggactttgccccggacagcaccggggaatacagaaccaccagacctatcggaacccgataccttacccgacccctttaa

SEQ ID NO: 645 - protein, 724 aa, Artificial Sequence
  Description of Artificial Sequence: Synthetic polypeptide
MSFVDHPPDWLEEVGEGLREFLGLEAGPPKPKPNQQHQDQARGLVLPGYNYLGPGNGLDRGEPVNRADEVAREHDISYNEQLEAGDNPYLKYNHADAEFQEKLADDTSFGGNLGKAVFQAKKRVLEPFGLVEEGAKTAPTGKRIDDHFPKRKKARTEEDSKPSTSSDAEAGPSGSQQLQIPAQPASSLGADTMSAGGGGPLGDNNQGADGVGNASGDWHCDSTWMGDRVVTKSTRTWVLPSYNNHQYREIKSGSVDGSNANAYFGYSTPWGYFDFNRFHSHWSPRDWQRLINNYWGFRPRSLRVKILNIQVKEVTVQDSTTTIANNLTSTVQVFTDDDYQLPYVVGNGTEGCLPAFPPQVFTLPQYGYATLNRDNTENPTERSSFFCLEYFPSKMLRTGNNFEFTYNFEEVPFHSSFAPSQNLFKLANPLVGQYLYRFVSTNNTGGVQFNENLAGRYANTYKNWFPGPMGRTQGWNLGSGVNRASVSAFATTNRMELEGASYQVPPQPNGMTNNLQGSNTYALENTMIFNSQPANPGTTATYLEGNMLITSESETQPVNRVAYNVGGQMATNNQSSTTAPATGTYNLQEIVPGSVWMERDVYLQGPIWAKIPETGAHFHPSPAMGGFGLKHPPPMMLIKNTPVPGNITSFSDVPVSSFITQYSTGQATVEMEWELKKENSKRWNPEIQYTNNYNDPQFVDFAPDSTGEYRTTRPIGTRYLTRPL

SEQ ID NO: 646 - DNA, 2175 bp, Artificial Sequence
  Description of Artificial Sequence: Synthetic polynucleotide
atgtcttttgttgatcaccctccagattggttggaagaagttggtgaaggtcttcgcgagtttttgggccttgaagcgggcccaccgaaaccaaaacccaatcagcagcatcaagatcaagcccgtggtcttgtgctgcctggttataactatctcggacccggaaacggcctcgatcgaggagagcctgtcaacagggcagacgaggtcgcgcgagagcacgacatctcgtacaacgagcagcttgaggcgggagacaacccctacctcaagtacaaccacgcggacgccgagtttcaggagaagctcgccgacgacacatccttcgggggaaacctcggaaaggcagtctttcaggccaagaaaagggttctcgaaccttttggcctggttgaagagggtgctaagacggcccctaccggaaagcggatagacgaccactttccaaaaagaaagaaggcccggaccgaagaggactccaagccttccacctcgtcagacgccgaagctggacccagcggatcccagcagctgcaaatcccagcccaaccagcctcaagtttgggagctgatacaatgtctgcgggaggtggcggcccattgggcgacaataaccaaggtgccgatggagtgggcaatgcctcgggagattggcattgcgattccacgtggatgggggacagagtcgtcaccaagtccacccgaacctgggtgctgcccagctacaacaaccaccagtaccgagagatcaaaagcggctccgtcgacggaagcaacgccaacgcctactttggatacagcaccccctgggggtactttgactttaaccgcttccacagccactggagcccccgagactggcaaagactcatcaacaactactggggcttcagaccccggtccctcagagtcaaaatcttcaacattcaagtcaaagaggtcacggtgcaggactccaccaccatcatcgccaacaacctcacctccaccgtccaagtgtttacggacgacgactaccagctgccctacgtcgtcggcaacgggaccgagggatgcctgccggccttccctccgcaggtctttacgctgccgcagtacggttacgcgacgctgaaccgcgacaacacagaaaatcccaccgagaggagcagcttcttctgcctagagtactttcccagcaagatgctgagaacgggcaacaactttgagtttacctacaactttgaggaggtgcccttccactccagcttcgcccccagtcagaacctcttcaagctggccaacccgctggtggaccagtacttgtaccgcttcgtgagcacaaataacactggcggagtccagttcaacaagaacctggccgggagatacgccaacacctacaaaaactggttcccggggcccatgggccgaacccagggctggaacctgggctccggggtcaaccgcgccagtgtcagcgccttcgccacgaccaataggatggagctcgagggcgcgagttaccaggtgcccccgcagccgaacggcatgaccaacaacctccagggcagcaacacctatgccctggagaacactatgatcttcaacagccagccggcgaacccgggcaccaccgccacgtacctcgagggcaacatgctcatcaccagcgagagcgagacgcagccggtgaaccgcgtggcgtacaacgtcggcgggcagatggccaccaacaaccagagctccaccactgcccccgcgaccggcacgtacaacctccaggaaatcgtgcccggcagcgtgtggatggagagggacgtgtacctccaaggacccatctgggccaagatcccagagacgggggcgcactttcacccctctccggccatgggcggattcggactcaaacacccaccgcccatgatgctcatcaagaacacgcctgtgcccggaaatatcaccagcttctcggacgtgcccgtcagcagcttcatcacccagtacagcaccgggcaggtcaccgtggagatggagtgggagctcaagaaggaaaactccaagaggtggaacccagagatccagtacacaaacaactacaacgacccccagtttgtggactttgccccggacagcaccggggaatacagaaccaccagacctatcggaacccgataccttacccgacccctttaa

SEQ ID NO: 647 - protein, 724 aa, Artificial Sequence
  Description of Artificial Sequence: Synthetic polypeptide
MSFVDHPPDWLEEVGEGLREFLGLEAGPPKPKPNQQHQDQARGLVLPGYNYLGPGNGLDRGEPVNRADEVAREHDISYNEQLEAGDNPYLKYNHADAEFQEKLADDTSFGGNLGKAVFQAKKRVLEPFGLVEEGAKTAPTGKRIDDHFPKRKKARTEEDSKPSTSSDAEAGPSGSQQLQIPAQPASSLGADTMSAGGGGPLGDNNQGADGVGNASGDWHCDSTWMGDRVVTKSTRTWVLPSYNNHQYREIKSGSVDGSNANAYFGYSTPWGYFDFNRFHSHWSPRDWQRLINNYWGFRPRSLRVKIFNIQVKEVTVQDSTTIIANNLTSTVQVFTDDDYQLPYVVGNGTEGCLPAFPPQVFTLPQYGYATLNRDNTENPTERSSFFCLEYFPSKMLRTGNNFEFTYNFEEVPFHSSFAPSQNLFKLANPLVDQYLYRFVSTNNTGGVQFNKNLAGRYANTYKNWFPGPMGRTQGWNLGSGVNRASVSAFATTNRMELEGASYQVPPQPNGMTNNLQGSNTYALENTMIFNSQPANPGTTATYLEGNMLITSESETQPVNRVAYNVGGQMATNNQSSTTAPATGTYNLQEIVPGSVWMERDVYLQGPIWAKIPETGAHFHPSPAMGGFGLKHPPPMMLIKNTPVPGNITSFSDVPVSSFITQYSTGQVTVEMEWELKKENSKRWNPEIQYTNNYNDPQFVDFAPDSTGEYRTTRPIGTRYLTRPL

SEQ ID NO: 648 - DNA, 2175 bp, Artificial Sequence
  Description of Artificial Sequence: Synthetic polynucleotide
atgtcttttgttgatcaccctccagattggttggaagaagttggtgaaggtcttcgcgagtttttgggccttgaagcgggcccaccgaaaccaaaacccaatcagcagcatcaagatcaagcccgtggtcttgtgctgcctggttataactatctcggacccggaaacggtctcgatcgaggagagcctgtcaacagggcagacgaggtcgcgcgagagcacgacatctcgtacaacgagcagcttgaggcgggagacaacccctacctcaagtacaaccacgcggacgccgagtttcaggagaagctcgccgacgacacatccttcgggggaaacctcggaaaggcagtctttcaggccaagaaaagggttctcgaaccttttggcctggttgaagagggtgctaagacggcccctaccggaaagcggatagacgaccactttccaaaaagaaagaaggcccggaccgaagaggactccaagccttccacctcgtcagacgccgaagctggacccagcggatcccagcagctgcaaatcccagcccaaccagcctcaagtttgggagctgatacaatgtctgcgggaggtggcggcccattgggcgacaataaccaaggtgccgatggagtgggcaatgcctcgggagattggcattgcgattccacgtggatgggggacagagtcgtcaccaagtccacccgaacctgggtgctgcccagctacaacaaccaccagtaccgagagatcaaaagcggctccgtcgacggaagcaacgccaacgcctactttggatacagcaccccctgggggtactttgactttaaccgcttccacagccactggagcccccgagactggcaaagactcatcaacaactactggggcttcagaccccggtccctcagagtcaaaatcttcaacattcaagtcaaagaggtcacggtgcaggactccaccaccaccatcgccaacaacctcacctccaccgtccaagtgtttacggacgacgactaccagctgccctacgtcgtcggcaacgggaccgagggatgcctgccggccttccctccgcaggtctttacgctgccgcagtacggttacgcgacgctgaaccgcgacaacacagaaaatcccaccgagaggagcagcttcttctgcctagagtactttcccagcaagatgctgagaacgggcaacaactttgagtttacctacaactttgaggaggtgcccttccactccagcttcgctcccagtcagaacctcttcaagctggccaacccgctggtggaccagtacttgtaccgcttcgtgagcacaaataacactggcggagtccagttcaacaagaacctggccgggagatacgccaacacctacaaaaactggttcccggggcccatgggccgaacccagggctggaacctgggctccggggtcaaccgcgccagtgtcagcgccttcgccacgaccaataggatggagctcgagggcgcgagttaccaggtgcccccgcagccgaacggcatgaccaacaacctccagggcagcaacacctatgccctggagaacactatgatcttcaacagccagccggcgaacccgggcaccaccgccacgtacctcgagggcaacatgctcatcaccagcgagagcgagacgcagccggtgaaccgcgtggcgtacaacgtcggcgggcagatggccaccaacaaccagagctccaccactgcccccgcgaccggcacgtacaacctccaggaaatcgtgcccggcagcgtgtggatggagagggacgtgtacctccaaggacccatctgggccaagatcccagagacgggggcgcactttcacccctctccggccatgggcggattcggactcaaacacccaccgcccatgatgctcatcaagaacacgcctgtgcccggaaatatcaccagcctctcggacgtgcccgtcagcagcttcatcacccagtacagcaccgggcaggtcaccgtggagatggagtgggagctcaagaaggaaaactccaagaggtggaacccagagatccagtacacaaacaactacaacgacccccagtttgtggactttgccccggacagcaccggggaatacagaaccaccagacctatcggaacccgataccttacccgacccctttaa

SEQ ID NO: 649 - protein, 724 aa, Artificial Sequence
  Description of Artificial Sequence: Synthetic polypeptide
MSFVDHPPDWLEEVGEGLREFLGLEAGPPKPKPNQQHQDQARGLVLPGYNYLGPGNGLDRGEPVNRADEVAREHDISYNEQLEAGDNPYLKYNHADAEFQEKLADDTSFGGNLGKAVFQAKKRVLEPFGLVEEGAKTAPTGKRIDDHFPKRKKARTEEDSKPSTSSDAEAGPSGSQQLQIPAQPASSLGADTMSAGGGGPLGDNNQGADGVGNASGDWHCDSTWMGDRVVTKSTRTWVLPSYNNHQYREIKSGSVDGSNANAYFGYSTPWGYFDFNRFHSHWSPRDWQRLINNYWGFRPRSLRVKIFNIQVKEVTVQDSTTTIANNLTSTVQVFTDDDYQLPYVVGNGTEGCLPAFPPQVFTLPQYGYATLNRDNTENPTERSSFFCLEYFPSKMLRTGNNFEFTYNFEEVPFHSSFAPSQNLFKLANPLVDQYLYRFVSTNNTGGVQFNKNLAGRYANTYKNWFPGPMGRTQGWNLGSGVNRASVSAFATTNRMELEGASYQVPPQPNGMTNNLQGSNTYALENTMIFNSQPANPGTTATYLEGNMLITSESETQPVNRVAYNVGGQMATNNQSSTTAPATGTYNLQEIVPGSVWMERDVYLQGPIWAKIPETGAHFHPSPAMGGFGLKHPPPMMLIKNTPVPGNITSLSDVPVSSFITQYSTGQVTVEMEWELKKENSKRWNPEIQYTNNYNDPQFVDFAPDSTGEYRTTRPIGTRYLTRPL

SEQ ID NO: 650 - DNA, 2175 bp, Artificial Sequence
  Description of Artificial Sequence: Synthetic polynucleotide
atgtcttttgttgatcaccctccagattggttggaagaagttggtgaaggtcttcgcgagtttttgggccttgaggcgggcccaccgaaaccaaaacccaatcagcagcatcaagatcaagcccgtggtcttgtgctgcctggttataactatctcggacccggaaacggtctcgatcgaggagagcctgtcaacagggcagacgaggtcgcgcgagagcacgacatctcgtacaacgagcagcttgaggcgggagacaacccctacctcaagtacaaccacgcggacgccgagtttcaggagaagctcgccgacgacacatccttcgggggaaacctcggaaaggcagtctttcaggccaagaaaagggttctcgaaccttttggcctggttgaagagggtgctaagacggcccctaccggaaagcggatagacgaccactttccaaaaagaaagaaggcccggaccgaagaggactccaagccttccaccccgtcagacgccgaagctggacccagcggatcccagcagctgcaaatcccagcccaaccagcctcaagtttgggagctgatacaatgtctgcgggaggtggcggcccattgggcgacaataaccaaggtgccgatggagtgggcaatgcctcgggagattggcattgcgattccacgtggatgggggacagagtcgtcaccaagtccacccgaacctgggtgctgcccagctacaacaaccaccagtaccgagagatcaaaagcggctccgtcgacggaagcaacgccaacgcctactttggatacagcaccccctgggggtactttgactttaaccgcttccacagccactggagcccccgagactggcaaagactcatcaacaactactggggcttcagaccccggtccctcagagtcaaaatcttcaacattcaagtcaaagaggtcacggtgcaggactccaccaccaccatcgccaacaacctcacctccaccgtccaagtgtttacggacgacgactaccagctgccctacgtcgtcggcaacgggaccgagggatgcctgccggccttccctccgcaggtctttacgctgccgcagtacggttacgcgacgctgaaccgcgacaacacagaaaatcccaccgagaggagcagcttcttctgcctagagtactttcccagcaagatgctgagaacgggcaacaactttgagtttacctacaactttgaggaggtgcccttccactccagcttcgctcccagtcagaacctcttcaagctggccaacccgctggtggaccagtacttgtaccgcttcgtgagcacaaataacactggcggagtccagttcaacaagaacctggccgggagatacgccaacacctacaaaaactggttcccggggcccatgggccgaacccagggctggaacctgggctccggggtcaaccgcgccagtgtcagcgccttcgccacgaccaataggatggagctcgagggcgcgagttaccaggtgcccccgcagccgaacggcatgaccaacaacctccagggcagcaacacctatgccctggagaacactatgatcttcaacagccagccggcgaacccgggcaccaccgccacgtacctcgagggcaacatgctcatcaccagcgagagcgagacgcagccggtgaaccgcgtggcgtacaacgtcggcgggcagatggccaccaacaaccagagctccaccactgcccccgcgaccggcacgtacaacctccaggaaatcgtgcccggcagcgtgtggatggagagggacgtgtacctccaaggacccatctgggccaagatcccagagacgggggcgcactttcacccctctccggccatgggcggattcggactcaaacacccaccgcccatgatgctcatcaagaacacgcctgtgcccggaaatatcaccagcttctcggacgtgcccgtcagcagcttcatcacccagtacagcaccgggcaggtcaccgtggagatggagtgggagctcaagaaggaaaactccaagaggtggaacccagagatccagtacacaaacaactacaacgacccccagtttgtggactttgccccggacagcaccggggaatacagaaccaccagacctatcggaacccgataccttacccgacccctttaa

SEQ ID NO: 651 - protein, 724 aa, Artificial Sequence
  Description of Artificial Sequence: Synthetic polypeptide
MSFVDHPPDWLEEVGEGLREFLGLEAGPPKPKPNQQHQDQARGLVLPGYNYLGPGNGLDRGEPVNRADEVAREHDISYNEQLEAGDNPYLKYNHADAEFQEKLADDTSFGGNLGKAVFQAKKRVLEPFGLVEEGAKTAPTGKRIDDHFPKRKKARTEEDSKPSTPSDAEAGPSGSQQLQIPAQPASSLGADTMSAGGGGPLGDNNQGADGVGNASGDWHCDSTWMGDRVVTKSTRTWVLPSYNNHQYREIKSGSVDGSNANAYFGYSTPWGYFDFNRFHSHWSPRDWQRLINNYWGFRPRSLRVKIFNIQVKEVTVQDSTTTIANNLTSTVQVFTDDDYQLPYVVGNGTEGCLPAFPPQVFTLPQYGYATLNRDNTENPTERSSFFCLEYFPSKMLRTGNNFEFTYNFEEVPFHSSFAPSQNLFKLANPLVDQYLYRFVSTNNTGGVQFNKNLAGRYANTYKNWFPGPMGRTQGWNLGSGVNRASVSAFATTNRMELEGASYQVPPQPNGMTNNLQGSNTYALENTMIFNSQPANPGTTATYLEGNMLITSESETQPVNRVAYNVGGQMATNNQSSTTAPATGTYNLQEIVPGSVWMERDVYLQGPIWAKIPETGAHFHPSPAMGGFGLKHPPPMMLIKNTPVPGNITSFSDVPVSSFITQYSTGQVTVEMEWELKKENSKRWNPEIQYTNNYNDPQFVDFAPDSTGEYRTTRPIGTRYLTRPL

SEQ ID NO: 652 - DNA, 2211 bp, Artificial Sequence
  Description of Artificial Sequence: Synthetic polynucleotide
atggctgctgacggttatcttccagattggctcgaggacaacctttctgaaggcattcgtgagtggtgggctctgaaacctggagtccctcaacccaaagcgaaccaacaacaccaggacaaccgtcggggtcttgtgcttccgggttacaaatacctcggacccggtaacggactcgacaaaggagagccggtcaacgaggcggacgcggcagccctcgaacacgacaaagcttacgaccagcagctcaaggccggtgacaacccgtacctcaagtacaaccacgccgacgccgagtttcaggagcgtcttcaagaagatacgtcttttgggggcaaccttggcagagcagtcttccaggccaaaaagaggatccttgagcctcttggtctggttgaggaagcagctaaaacggctcctggaaagaagaggcctgtagatcagtctcctcaggaaccggactcatcatctggtgttggcaaatcgggcaaacagcctgccagaaaaagactaaatttcggtcagactggcgactcagagtcagtcccagaccctcaacctctcggagaaccaccagcagcccccacaagtttgggatctaatacaatggcttcaggcggtggcgcaccaatggcagacaataacgagggtgccgatggagtgggtaattcctcaggaaattggcattgcgattcccaatggctgggcgacagagtcatcaccaccagcaccagaacctgggccctgcccacttacaacaaccatctctacaagcaaatctccagccaatcaggagcttcaaacgacaaccactactttggctacagcaccccttgggggtattttgactttaacagattccactgccacttctcaccacgtgactggcagcgactcattaacaacaactggggattccggcccaagaaactcagcttcaagctcttcaacatccaagttaaagaggtcacgcagaacgatggcacgacgactattgccaataaccttaccagcacggttcaagtgtttacggactcggagtatcagctcccgtacgtgctcgggtcggcgcaccaaggctgcctcccgccgtttccagcggacgtcttcatggtccctcagtatggatacctcaccctgaacaacggaagtcaagcggtgggacgctcatccttttactgcccggagtacttcccttcgcagatgctaaggactggaaataacttccaattcagctataccttcgaggatgtaccttttcacagcagctacgctcacagccagagtttggatcgcttgatgaatcctcttattgatcagtatctgtactacctgaacagaacgcaaggaacaacctctggaacaaccaaccaatcacggctgctttttagccaggctgggcctcagtctatgtctttgcaggccagaaattggctacctgggccctgctaccggcaacagagactttcaaagactgctaacgacaacaacaacagtaactttccttggacagcggccagcaaatatcatctcaatggccgcgactcgctggtgaatccaggaccagctatggccagtcacaaggacgatgaagaaaaatttttccctatgcacggcaatctaatatttggcaaagaagggacaacggcaagtaacgcagaattagataatgtaatgattacggatgaagaagagattcgtaccaccaatcctgtggcaacagagcagtatggaactgtggcaaataacttgcagagctcaaatacagctcccacgactagaactgtcaatgatcagggggccttacctggcatggtgtggcaagatcgtgacgtgtaccttcaaggacctatctgggcaaagattcctcacacggatggacactttcatccttctcctctgatgggaggctttggactgaaacatccgcctcctcaaatcatgatcaaaaatactccggtaccggcaaatcctccgacgactttcagcccggccaagtttgcttcatttatcactcagtactccactggacaggtcagcgtggaaattgagtgggagctacagaaagaaaacagcaaacgttggaatccagagattcagtacacttccaactacaacaagtctgttaatgtggactttactgtagacactaatggtgtttatagtgaacctcaccctattggaacccggtatctcacacgaaacttgtaa

SEQ ID NO: 653 - protein, 736 aa, Artificial Sequence
  Description of Artificial Sequence: Synthetic polypeptide
MAADGYLPDWLEDNLSEGIREWWALKPGVPQPKANQQHQDNRRGLVLPGYKYLGPGNGLDKGEPVNEADAAALEHDKAYDQQLKAGDNPYLKYNHADAEFQERLQEDTSFGGNLGRAVFQAKKRILEPLGLVEEAAKTAPGKKRPVDQSPQEPDSSSGVGKSGKQPARKRLNFGQTGDSESVPDPQPLGEPPAAPTSLGSNTMASGGGAPMADNNEGADGVGNSSGNWHCDSQWLGDRVITTSTRTWALPTYNNHLYKQISSQSGASNDNHYFGYSTPWGYFDFNRFHCHFSPRDWQRLINNNWGFRPKKLSFKLFNIQVKEVTQNDGTTTIANNLTSTVQVFTDSEYQLPYVLGSAHQGCLPPFPADVFMVPQYGYLTLNNGSQAVGRSSFYCPEYFPSQMLRTGNNFQFSYTFEDVPFHSSYAHSQSLDRLMNPLIDQYLYYLNRTQGTTSGTTNQSRLLFSQAGPQSMSLQARNWLPGPCYRQQRLSKTANDNNNSNFPWTAASKYHLNGRDSLVNPGPAMASHKDDEEKFFPMHGNLIFGKEGTTASNAELDNVMITDEEEIRTTNPVATEQYGTVANNLQSSNTAPTTRTVNDQGALPGMVWQDRDVYLQGPIWAKIPHTDGHFHPSPLMGGFGLKHPPPQIMIKNTPVPANPPTTFSPAKFASFITQYSTGQVSVEIEWELQKENSKRWNPEIQYTSNYNKSVNVDFTVDTNGVYSEPHPIGTRYLTRNL

SEQ ID NO: 654 - DNA, 2211 bp, Artificial Sequence
  Description of Artificial Sequence: Synthetic polynucleotide
atggctgctgatggttatcttccagattggctcgaggacaacctttctgaaggcattcgtgagtggtgggctctgaaacctggagtccctcaacccaaagcgaaccaacaacaccaggacaaccgtcggggtcttgtgcttccgggttacaaatacctcggacccggtaacggactcgacaaaggagagccggtcaacgaggcggacgcggcagccctcgaacacgacaaagcttacgaccagcagctcaaggccggtgacaacccgtacctcaagtacaaccacgccgacgccgagtttcaggagcgtcttcaagaagatacgtcttttgggggcaaccttggcagagcagtcttccaggccaaaaagaggatccttgagcctcttggtctggttgaggaagcagctaaaacggctcctggaaagaagaggcctgtagatcagtctcctcaggaaccggactcatcatctggtgttggcaaatcgggcaaacagcctgccagaaaaagactaaatttcggtcagactggcgactcagagtcagtcccagaccctcaacctctcggagaaccaccagcagcccccacaagtttgggatctaatacaatggcttcaggcggtggcgcaccaatggcagacaataacgagggtgccgatggagtgggtaattcctcaggaaattggcattgcgattcccaatggctgggcgacagagtcatcaccaccagcaccagaacctgggccctgcccacttacaacaaccatctctacaagcaaatctccagccaatcaggagcttcaaacgacaaccactactttggctacagcaccccttgggggtattttgactttaacagattccactgccacttctcaccacgtgactggcagcgactcattaacaacaactggggattccggcccaagaaactcagcttcaagctcttcaacatccaagttaaagaggtcacgcagaacgatggcacgacgactgttgccaataaccttaccagcacggttcaagtgtttacggactcggagtatcaactcccgtacgtgctcgggtcggcgcaccaaggctgtctcccgccgtttccagcggacgtcttcatggtccctcagtatggatacctcaccctgaacaacggaagtcaagcggtgggacgctcatccttttactgcctggagtacttcccttcgcagatgctaaggactggaaataacttccaattcagctataccttcgaggatgtaccttttcacagcagctacgctcacagccagagtttggatcgcttgatgaatcctcttattgatcagtatctgtactacctgaacagaacgcaaggaacaacctctggaacaaccaaccaatcacggctgctttttagccaggctgggcctcagtctatgtctttgcaggccagaaattggctacctgggccctgctaccggcaacagagactttcaaagactgctaacgacaacaacaacagtaactttccttggacagcggccagcaaatatcatctcaatggccgcgactcgctggtgaatccaggaccagctatggccagtcacaaggacgatgaagaaaaatttttccctatgcacggcaatctaatatttggcaaagaagggacaacggcaagtaacgcagaattagataatgtaatgattacggatgaagaagagattcgtaccaccaatcctgtggcaacagagcagtatggaactgtggcaaataacttgcagagctcaaatacagctcccacgactagaactgtcaatgatcagggggccttacctggcatggtgtggcaagatcgtgacgtgtaccttcaaggacctatctgggcaaagattcctcacacggatggacactttcatccttctcctctgatgggaggctttggactgaaacatccgcctcctcaaatcatgatcaaaaatactccggtaccggcaaatcctccgacgactttcagcccggccaagtttgcttcatttatcactcagtactccactggacaggtcagcgtggaaattgagtgggagctacagaaagaaaacagcaaacgttggaatccagagattcagtacacttccaactacaacaagtctgttaatgtggactttactgtagacactaatggtgtttatagtgaacctcgccctattggaacccggtatctcacacgaaacttgtaa

SEQ ID NO: 655 - protein, 736 aa, Artificial Sequence
  Description of Artificial Sequence: Synthetic polypeptide
MAADGYLPDWLEDNLSEGIREWWALKPGVPQPKANQQHQDNRRGLVLPGYKYLGPGNGLDKGEPVNEADAAALEHDKAYDQQLKAGDNPYLKYNHADAEFQERLQEDTSFGGNLGRAVFQAKKRILEPLGLVEEAAKTAPGKKRPVDQSPQEPDSSSGVGKSGKQPARKRLNFGQTGDSESVPDPQPLGEPPAAPTSLGSNTMASGGGAPMADNNEGADGVGNSSGNWHCDSQWLGDRVITTSTRTWALPTYNNHLYKQISSQSGASNDNHYFGYSTPWGYFDFNRFHCHFSPRDWQRLINNNWGFRPKKLSFKLFNIQVKEVTQNDGTTTVANNLTSTVQVFTDSEYQLPYVLGSAHQGCLPPFPADVFMVPQYGYLTLNNGSQAVGRSSFYCLEYFPSQMLRTGNNFQFSYTFEDVPFHSSYAHSQSLDRLMNPLIDQYLYYLNRTQGTTSGTTNQSRLLFSQAGPQSMSLQARNWLPGPCYRQQRLSKTANDNNNSNFPWTAASKYHLNGRDSLVNPGPAMASHKDDEEKFFPMHGNLIFGKEGTTASNAELDNVMITDEEEIRTTNPVATEQYGTVANNLQSSNTAPTTRTVNDQGALPGMVWQDRDVYLQGPIWAKIPHTDGHFHPSPLMGGFGLKHPPPQIMIKNTPVPANPPTTFSPAKFASFITQYSTGQVSVEIEWELQKENSKRWNPEIQYTSNYNKSVNVDFTVDTNGVYSEPRPIGTRYLTRNL

SEQ ID NO: 656 - DNA, 2175 bp, Artificial Sequence
  Description of Artificial Sequence: Synthetic polynucleotide
atgtcttttgttgatcaccctccagattggttggaagaagttggtgaaggtcttcgcgagtttttgggccttgaagcgggcccaccgaaaccaaaacccaatcagcagcatcaagatcaagcccgtggtcttgtgctgcctggttataactatctcggacccggaaacggtctcgatcgaggagagcctgtcaacagggcagacgaggtcgcgcgagagcacgacatctcgtacaacgagcagcttgaggcgggagacaacccctacctcaagtacaaccacgcggacgccgagtttcaggagaagctcgccgacgacacatccttcgggggaaacctcggaaaggcagtctttcaggccaagaaaagggttctcgaaccttttggcctggttgaagagggtgctaagacggcccctaccggaaagcggatagacgaccactttccaaaaagaaagaaggcccggaccgaagaggactccaagccttccacctcgtcagacgccgaagctggacccagcggatcccagcagctgcaaatcccagcccaaccagcctcaagtttgggagctgatacaatgtctgcgggaggtggcggcccattgggcgacaataaccaaggtgccgatggagtgggcaatgcctcgggagattggcattgcgattccacgtggatgggggacagagtcgtcaccaagtccacccgaacctgggtgctgcccagctacaacaaccaccagtaccgagagatcaaaagcggctccgtcgacggaagcaacgccaacgcctactttggatacagcaccccctgggggtactttgactttaaccgcttccacagccactggagcccccgagactggcaaagactcatcaacaactactggggcttcagaccccggtccctcagagtcaaaatcttcaacattcaagtcaaagaggtcacggtgcaggactccaccaccaccatcgccaacaacctcacctccaccgtccaagtgtttacggacgacgactaccagctgccctacgtcgtcggcaacgggaccgagggatgcctgccggccttccctccgcaggtctttacgctgccgcagtacggttacgcgacgctgaaccgcgacaacacagaaaatcccaccgagaggagcagcttcttctgcctagagtactttcccagcaagatgctgagaacgggcaacaactttgagtttacctacaactttgaggaggtgcccttccactccagcttcgctcccagtcagaacctcttcaagctggccaacccgctggtggaccagtacttgtaccgcttcgtgagcacaaataacactggcggagtccagttcaacaagaacctggccgggagatacgccaacacccacaaaaactggttcccggggcccatgggccgaacccagggctggaacctgggctccggggtcaaccgcgccagtgtcagcgccttcgccacgaccaataggatggagctcgagggcgcgagttaccaggtgcccccgcagtcgaacggcatgaccaacaacctccggggcagcaacacctatgccctggagaacactatgatcttcaacagccagccggcgaacccgggcaccaccgccacgtacctcgagggcaacatgctcatcaccagcgagagcgagacgcagccggtgaaccgcgtggcgtacaacgtcggcgggcagatggccaccaacaaccagagctccaccactgcccccgcgaccggcacgtacaacctccaggaaatcgtgcccggcagcgtgtggatggagagggacgtgtacctccaaggacccatctgggccaagatcccagagacgggggcgcactttcacccctctccggccatgggcggattcggactcaaacacccaccgcccatgatgctcatcaagaacacgcctgtgcccggaaatatcaccagcttctcggacgtgcccgtcagcagcttcatcacccagtacagcaccgggcaggtcaccgtggagatggagtgggagctcaagaaggaaaactccaagaggtggaacccagagatccagtacacaaacaactacaacgacccccagtttgtggactttgccccggacagcaccggggaatacagaaccaccagacctatcggaacccgataccttacccgacccctttaa

SEQ ID NO: 657 - protein, 724 aa, Artificial Sequence
  Description of Artificial Sequence: Synthetic polypeptide
MSFVDHPPDWLEEVGEGLREFLGLEAGPPKPKPNQQHQDQARGLVLPGYNYLGPGNGLDRGEPVNRADEVAREHDISYNEQLEAGDNPYLKYNHADAEFQEKLADDTSFGGNLGKAVFQAKKRVLEPFGLVEEGAKTAPTGKRIDDHFPKRKKARTEEDSKPSTSSDAEAGPSGSQQLQIPAQPASSLGADTMSAGGGGPLGDNNQGADGVGNASGDWHCDSTWMGDRVVTKSTRTWVLPSYNNHQYREIKSGSVDGSNANAYFGYSTPWGYFDFNRFHSHWSPRDWQRLINNYWGFRPRSLRVKIFNIQVKEVTVQDSTTTIANNLTSTVQVFTDDDYQLPYVVGNGTEGCLPAFPPQVFTLPQYGYATLNRDNTENPTERSSFFCLEYFPSKMLRTGNNFEFTYNFEEVPFHSSFAPSQNLFKLANPLVDQYLYRFVSTNNTGGVQFNKNLAGRYANTHKNWFPGPMGRTQGWNLGSGVNRASVSAFATTNRMELEGASYQVPPQSNGMTNNLRGSNTYALENTMIFNSQPANPGTTATYLEGNMLITSESETQPVNRVAYNVGGQMATNNQSSTTAPATGTYNLQEIVPGSVWMERDVYLQGPIWAKIPETGAHFHPSPAMGGFGLKHPPPMMLIKNTPVPGNITSFSDVPVSSFITQYSTGQVTVEMEWELKKENSKRWNPEIQYTNNYNDPQFVDFAPDSTGEYRTTRPIGTRYLTRPL

SEQ ID NO: 658 - DNA, 2175 bp, Artificial Sequence
  Description of Artificial Sequence: Synthetic polynucleotide
atgtcttttgttgatcaccctccagattggttggaagaagttggtgaaggtcttcgcgagtttttgggccttgaagcgggcccaccgaaaccaaaacccaatcagcagcatcaagatcaagcccgtggtcttgtgctgcctggttataactatctcggacccggaaacggtctcgatcgaggagagcctgtcaacagggcagacgaggtcgcgcgagagcacgacatctcgtacaacgagcagcttgaggcgggagacaacccctacctcaagtacaaccacgcggacgccgagtttcaggagaagctcgccgacgacacatccttcgggggaaacctcggaaaggcagtctttcaggccaagaaaagggttctcgaaccttttggcctggttgaagagggtgctaagacggcccctaccggaaagcggatagacgaccactttccaaaaagaaagaaggcccggaccgaagaggactccaagccttccacctcgtcagacgccgaagctggacccagcggatcccagcagctgcaaatcccagcccaaccagcctcaagtttgggagctgatacaatgtctgcgggaggtggcggcccattgggcgacaataaccaaggtgccgatggagtgggcaatgcctcgggagattggcattgcgattccacgtggatgggggacagagtcgtcaccaagtccacccgaacctgggtgctgcccagctacaacaaccaccagtaccgagagatcaaaagcggctccgtcgacggaagcaacgccaacgcctactttggatacagcaccccctgggggtactttgactttaaccgcttccacagccactggagcccccgagactggcaaagactcatcaacaactactggggcttcagaccccggtccctcagagtcaaaatcttcaacattcaagtcaaagaggtcacggtgcaggactccaccaccaccatcgccaacaacctcacctccaccgtccaagtgtttacggacgacgactaccagctgccctacgtcgtcggcaacgggaccgagggatgcctgccggccttccctccgcaggtctttacgctgccgcagtacggttacgcgacgctgaaccgcgacaacacagaaaatcccaccgagaggagcagcttcttctgcctagagtactttcccagcaagatgctgagaacgggcaacaactttgagtttacctacaactttgaggaggtgcccttccactccagcttcgctcccagtcagaacctcttcaagctggccaacccgctggtggaccagtacttgtaccgcttcgtgagcacaaataacactggcggagtccagttcaacaagaacctggccgggagatacgccaacacctacaaaaactggttcccggggcccatgggccgaacccagggctggaacctgggctccggggtcaaccgcgccagtgtcagcgccttcgccacgaccaataggatggagctcgagggcgcgagttaccaggtgcccccgcagccgaacggcatgaccaacaacctccagggcagcaacacctatgccctggagaacactatgatcttcaacagccagccggcgaacccgggcaccaccgccacgtacctcgagggcaacatgctcatcaccagcgagagcgagacgcagccggtgaaccgcgtggcgtacagcgtcggcgggcagatggccaccaacaaccagagctccaccactgcccccacgaccggcacgtacaacctccaggaaatcgtgcccggcagcgtgtggatggagagggacgtgtacctccaaggacccatctgggccaagatcccagagacgggggcgcactttcacccctctccggccatgggcggattcagactcaaacacccaccgcccatgatgctcatcaagaacacgcctgtgcccggaaatatcaccagcttctcggacgtgcccgtcagcagcttcatcacccagtacagcaccgggcaggtcaccgtggagatggagtgggagctcaagaaggaaaactccaagaggtggaacccagagatccagtacacaaacaactacaacgacccccagtttgtggactttgccccggacagcaccggggaatacagaaccaccagacctatcggaacccgataccttacccgacccctttaa

SEQ ID NO: 659 - protein, 724 aa, Artificial Sequence
  Description of Artificial Sequence: Synthetic polypeptide
MSFVDHPPDWLEEVGEGLREFLGLEAGPPKPKPNQQHQDQARGLVLPGYNYLGPGNGLDRGEPVNRADEVAREHDISYNEQLEAGDNPYLKYNHADAEFQEKLADDTSFGGNLGKAVFQAKKRVLEPFGLVEEGAKTAPTGKRIDDHFPKRKKARTEEDSKPSTSSDAEAGPSGSQQLQIPAQPASSLGADTMSAGGGGPLGDNNQGADGVGNASGDWHCDSTWMGDRVVTKSTRTWVLPSYNNHQYREIKSGSVDGSNANAYFGYSTPWGYFDFNRFHSHWSPRDWQRLINNYWGFRPRSLRVKIFNIQVKEVTVQDSTTTIANNLTSTVQVFTDDDYQLPYVVGNGTEGCLPAFPPQVFTLPQYGYATLNRDNTENPTERSSFFCLEYFPSKMLRTGNNFEFTYNFEEVPFHSSFAPSQNLFKLANPLVDQYLYRFVSTNNTGGVQFNKNLAGRYANTYKNWFPGPMGRTQGWNLGSGVNRASVSAFATTNRMELEGASYQVPPQPNGMTNNLQGSNTYALENTMIFNSQPANPGTTATYLEGNMLITSESETQPVNRVAYSVGGQMATNNQSSTTAPTTGTYNLQEIVPGSVWMERDVYLQGPIWAKIPETGAHFHPSPAMGGFRLKHPPPMMLIKNTPVPGNITSFSDVPVSSFITQYSTGQVTVEMEWELKKENSKRWNPEIQYTNNYNDPQFVDFAPDSTGEYRTTRPIGTRYLTRPL

SEQ ID NO: 660 - DNA, 2211 bp, Artificial Sequence
  Description of Artificial Sequence: Synthetic polynucleotide
atggctgctgacggttatcttccagattggctcgaggacaacctttctgaaggcattcgtgagtggtgggctctgaaacctggagtccctcaacccaaagcgaaccaacaacaccaggacaaccgtcggggtcttgtgcttccgggttacaaatacctcggacccggtaacggactcgacaaaggagagccggtcaacgaggcggacgcggcagccctcgaacacgacaaagcttacgaccagcagctcaaggccggtgacaacccgtacctcaagtacaaccacgccgacgccgagtttcaggagcgtcttcaagaagatacgtcttttgggggcaaccttggcagagcagtcttccaggccaaaaagaggatccttgagcctcttggtctggttgaggaagcagctaaaacggctcctggaaagaagaggcctgtagatcagtctcctcaggaaccggactcatcatctggtgttggcaaatcgggcaaacagcctgccagaaaaagactaaatttcggtcagactggcgactcagagtcagtcccagaccctcaacctctcggagaaccaccagcagcccccacaagtttgggatctaatacaatggcttcaggcggtggcgcaccaatggcagacaataacgagggtgccgatggagtgggtaattcctcaggaaattggcattgcgattcccaatggctgggcgacagagtcatcaccaccagcaccagaacctgggccctgcccacttacaacaaccatctctacaagcaaatctccggccaatcaggagcttcaaacgacaaccactactttggctacagcaccccttgggggtattttgactttaacagattccactgccacttctcaccacgtgactggcagcgactcattaacaacaactggggattccggcccaagaaactcagcttcaagctcttcaacatccaagttaaagaggtcacgcagaacgatggcacgacgactattgccaataaccttaccagcacggttcaagtgtttacggactcggagtatcagctcccgtacgtgctcgggtcggcgcaccaaggctgtctcccgccgtttccagcggacgtcttcatggtccctcagtatggatacctcaccctgaacaacggaagtcaagcggtgggacgctcatccttttactgcctggagtacttcccttcgcagatgctaaggactggaaataacttccaattcagctataccttcgaggatgtaccttttcacagcagctacgctcacagccagagtttggatcgcttgatgaatcctcttattgatcagtatctgtactacctgaacagaacgcaaggaacaacctctggaacaaccaaccaatcacggctgctttttagccaggctgggcctcagtctatgtctttgcaggccagaaattggctacctgggccctgctaccggcaacagagactttcaaagactgctaacggcaacaacaacagtaactttccttggacagcggccagcaaatatcatctcaatggccgcgactcgctggtgaatccaggaccagctatggccagtcacaaggacgatgaagaaaaatttttccctatgcacggcaatctaatatttggcaaagaagggacaacggcaagtaacgcagaattagataatgtaatgattacggatgaagaagagattcgtaccaccaatcctgtggcaacagagcagtgtggaactgtggcaaataacttgcagagctcaaatacagctcccacgactagaactgtcaatgatcagggggccttacctggcatggtgtggcaagatcgtgacgtgtaccttcaaggacctatctgggcaaagattcctcacacggatggacactttcatccttctcctctgatgggaggctttggactgaaacatccgcctcctcaaatcatgatcaaaaatactccggtaccggcaaatcctccgacgactttcagcccggccaagtttgcttcatttatcactcagtactccactggacaggtcagcgtggaaattgagtgggagctacagaaagaaaacagcaaacgttggaatccagagattcagtacacttccaactacaacaagtctgttaatgtggactttactgtagacactaatggtgtttatagtgaacctcgccctattggaacccggtatctcacacgaaacttgtaa

SEQ ID NO: 661 - protein, 736 aa, Artificial Sequence
  Description of Artificial Sequence: Synthetic polypeptide
MAADGYLPDWLEDNLSEGIREWWALKPGVPQPKANQQHQDNRRGLVLPGYKYLGPGNGLDKGEPVNEADAAALEHDKAYDQQLKAGDNPYLKYNHADAEFQERLQEDTSFGGNLGRAVFQAKKRILEPLGLVEEAAKTAPGKKRPVDQSPQEPDSSSGVGKSGKQPARKRLNFGQTGDSESVPDPQPLGEPPAAPTSLGSNTMASGGGAPMADNNEGADGVGNSSGNWHCDSQWLGDRVITTSTRTWALPTYNNHLYKQISGQSGASNDNHYFGYSTPWGYFDFNRFHCHFSPRDWQRLINNNWGFRPKKLSFKLFNIQVKEVTQNDGTTTIANNLTSTVQVFTDSEYQLPYVLGSAHQGCLPPFPADVFMVPQYGYLTLNNGSQAVGRSSFYCLEYFPSQMLRTGNNFQFSYTFEDVPFHSSYAHSQSLDRLMNPLIDQYLYYLNRTQGTTSGTTNQSRLLFSQAGPQSMSLQARNWLPGPCYRQQRLSKTANGNNNSNFPWTAASKYHLNGRDSLVNPGPAMASHKDDEEKFFPMHGNLIFGKEGTTASNAELDNVMITDEEEIRTTNPVATEQCGTVANNLQSSNTAPTTRTVNDQGALPGMVWQDRDVYLQGPIWAKIPHTDGHFHPSPLMGGFGLKHPPPQIMIKNTPVPANPPTTFSPAKFASFITQYSTGQVSVEIEWELQKENSKRWNPEIQYTSNYNKSVNVDFTVDTNGVYSEPRPIGTRYLTRNL

SEQ ID NO: 662 - DNA, 2208 bp, Artificial Sequence
  Description of Artificial Sequence: Synthetic polynucleotide
atggctgccgatggttatcttccagattggctcgaggacaacctctctgagggcattcgcgagtggtgggacttgaaacctggagccccgaagcccaaagccaaccagcaaaagcaggacgacggccggggtctggtgcttcctggctacaagtacctcggacccttcaacggactcgacaagggggagcccgtcaacgcggcggacgcagcggccctcgagcacgacaaggcctacgaccagcagctcaaagcgggtgacaatccgtacccgcggtataaccacgccgacgccgagtttcaggagcgtctgcaagaagatacgtcttttgggggcaacctcgggcgagcagtcttccaggccaagaagcgggttctcgaacctctcggtctggttggggaaggcgctaagacggctcctggaaagaaacgtccggtagagcagtcgccacaagagccagactcctcctcgggcatcggcaagacaggccagcagcccgctaaaaagagactcaattttggtcagactggcgactcagagtcagtccccgatccacaacctctcggagaacctccagcaacccccgctgctgtgggacctactacaatggcttcaggcggtggcgcaccaatggcagacaataacgaaggcgccgacggagtgggtaatgcctcaggaaattggcattgcgattccacatggctgggcgacagagtcatcaccaccagcacccgcacctgggccttgcccacctacaataaccacctctacaagcaaatctccagtgcttcaacgggggccagcaacgacaaccactacttcggctacagcaccccctgggggtattttgatttcaacagattccactgccacttttcaccacgtgactggcagcgactcatcaacaacaattggggattccggcccaagagactcaacttcaaactcttcaacatccaagtcaaggaggtcacgacgaatgatggcgtcacaaccatcgctaataaccttaccagcacggttcaagtcttctcggactcggagtaccagcttccgtacgtcctcggctctgcgcaccagggctgcctccctccgttcccggcggacgtgttcatgattccgcaatacggctacctgacgctcaacaatggcagccaagccgtgggacgttcatccttttactgcctggaatatttcccttctcagatgctgagaacgggcaacaactttaccttcagctacacctttgaggaagtgcctttccacagcagctacgcgcacagccagagcctggaccggctgatgaatcctcccatcgaccaatacctgtattacctgaacagaactcaaaatcagtccggaagtgcccaaaacaaggacttgctgtttagccgtgggtctccagctggcatgtctgttcagcccaaaaactggctacctggaccctgttatcggcagcagcgcgtttctaaaacaaaaacagacaacaacaacagcaattttacctggactggtgcttcaaaatataacctcaatgggcgtgaatccatcatcaaccctggcactgctatggcctcacacaaagacgacgaagacaagttctttcccatgagcggtgtcatgatttttggaaaagagagcgccggagcttcaaacactgcattggacaatgtcatgattacagacgaagaggaaattaaagccactaaccctgtggccaccgaaagatttgggaccgtggcagtcaatttccagagcagcagcacagaccctgcgaccggagatgtgcatgctatgggagcattacctggcatggtgtggcaagatagagacgtgtacctgcagggtcccatttgggccaaaattcctcacacagatggacactttcacccgtctcctcttatgggcggctttggactcaagaacccgcctcctcagatcctcatcaaaaacacgcctgttcctgcgaatcctccggcggagttttcagctacaaagtttgcttcattcatcacccaatactccacaggacaagtgagtgtggaaattgaatgggagctgcagaaagaaaacagcaagcgctggaatcccgaagtgcagtacacatccaattatgcaaaatctgccaacgttgattttactgtggacaacaatggactttatactgagcctcgccccattggcacccgttaccttacccgtcccctg

SEQ ID NO: 663 - protein, 736 aa, Artificial Sequence
  Description of Artificial Sequence: Synthetic polypeptide
MAADGYLPDWLEDNLSEGIREWWDLKPGAPKPKANQQKQDDGRGLVLPGYKYLGPFNGLDKGEPVNAADAAALEHDKAYDQQLKAGDNPYPRYNHADAEFQERLQEDTSFGGNLGRAVFQAKKRVLEPLGLVGEGAKTAPGKKRPVEQSPQEPDSSSGIGKTGQQPAKKRLNFGQTGDSESVPDPQPLGEPPATPAAVGPTTMASGGGAPMADNNEGADGVGNASGNWHCDSTWLGDRVITTSTRTWALPTYNNHLYKQISSASTGASNDNHYFGYSTPWGYFDFNRFHCHFSPRDWQRLINNNWGFRPKRLNFKLFNIQVKEVTTNDGVTTIANNLTSTVQVFSDSEYQLPYVLGSAHQGCLPPFPADVFMIPQYGYLTLNNGSQAVGRSSFYCLEYFPSQMLRTGNNFTFSYTFEEVPFHSSYAHSQSLDRLMNPPIDQYLYYLNRTQNQSGSAQNKDLLFSRGSPAGMSVQPKNWLPGPCYRQQRVSKTKTDNNNSNFTWTGASKYNLNGRESIINPGTAMASHKDDEDKFFPMSGVMIFGKESAGASNTALDNVMITDEEEIKATNPVATERFGTVAVNFQSSSTDPATGDVHAMGALPGMVWQDRDVYLQGPIWAKIPHTDGHFHPSPLMGGFGLKNPPPQILIKNTPVPANPPAEFSATKFASFITQYSTGQVSVEIEWELQKENSKRWNPEVQYTSNYAKSANVDFTVDNNGLYTEPRPIGTRYLTRPL

SEQ ID NO: 664 - DNA, 2208 bp, Artificial Sequence
  Description of Artificial Sequence: Synthetic polynucleotide
atggctgccgatggttatcttccagattggctcgaggacaacctctctgagggcattcgcgagtggtgggacttgaaacctggagccccgaagcccaaagccaaccagcaaaagcaggacgacggccggggtctggtgcttcctggctacaagtacctcggacccttcaacggactcgacaagggggagcccgtcaacgcggcggacgcagcggccctcgagcacgacaaggcctacgaccagcagctcaaagcgggtgacaatccgtacctgcggtataaccacgccgacgccgagtttcaggagcgtctgcaagaagatacgtcttttgggggcaacctcgggcgagcagtcttccaggccaagaagcgggttctcgaacctctcggtctggttgaggaaggcgctaagacggctcctggaaagaaacgtccggtagagcagtcgccacaagagccagactcctcctcgggcatcggcaagacaggccagcagcccgctaaaaagagactcaattttggtcagactggcgactcagagtcagtccccgatccacgacctctcggagaacctccagcaacccccgctgctgtgggacctactacaatggcttcaggcggtggcgcaccaatggcagacaataacgaaggcgccgacggagtgggtaatgcctcaggaaattggcattgcgattccacatggctgggcgacagagtcatcaccaccagcacccgcacctgggccttgcccacctacaataaccacctctacaagcaaatctccagtgcttcaacgggggccagcaacgacaaccactacttcggctacagcaccccctgggggtattttgatttcaacagattccactgccacttttcaccacgcgactggcagcgactcatcaacaacaattggggattccggcccaagagactcaacttcaaactcttcaacatccaagtcaaggaggtcacgacgaatgatggcgtcacaaccatcgctaataaccttaccagcacggttcaagtcttctcggactcggagtaccagcttccgtacgtcctcggctctgcgcaccagggctgcctccctccgttcccggcggacgtgttcatgattccgcaatacggctacctgacgctcaacaatggcagccaagccgtgggacgttcatccttttactgcctggaatatttcccttctcagatgctgagaacgggcaacaactttaccttcagctacacctttgaggaagtgcctttccacagcagctacgcgcacagccagagcctggaccggctgatgaatcctctcatcgaccaatacctgtattacctgaacagaactcaaaatcagtccggaagtgcccaaaacaaggacttgctgtttagccgtgggcctccagctggcatgtctgttcagcccaaaaactggctacctggaccctgttatcggcagcagcgcgtttctaaaacaaaaacagacaacaacaacagcaattttacctggactggtgcttcaaaatataacctcaatgggcgtgaatccatcatcaaccctggcactgctatggcctcacacaaagacgacgaagacaagttctttcccatgagcggtgtcatgatttttggaaaagagagcgccggagcttcaaacactgcattggacaatgtcatgattacggacgaagaggaaattaaagccactaaccctgtggccaccgaaagatttgggaccgtggcagtcaatttccagagcagcagcacagaccctgcgaccggagatgtgcatgctatgggagcattacctggcatggtgtggcaagatagagacgtgtacctgcagggtcccatttgggccaaaattcctcacacagatggacactttcacccgtctcctcttatgggcggctttggactcaagaacccgcctcctcagatcctcatcaaaaacacgcctgttcctgcgaatcctccggcggagttttcagctacaaagtttgcttcattcatcacccaatactccacaggacaagtgagtgtggaaattgaatgggagctgcagaaagaaaacagcaagcgctggaatcccgaagtgcagtacacatccaattatgcaaaatctgccaacgttgattttactgtggacaacaatggactttatactgagcctcgccccattggcacccgttaccttacccgtcccctg

SEQ ID NO: 665 - protein, 736 aa, Artificial Sequence
  Description of Artificial Sequence: Synthetic polypeptide
MAADGYLPDWLEDNLSEGIREWWDLKPGAPKPKANQQKQDDGRGLVLPGYKYLGPFNGLDKGEPVNAADAAALEHDKAYDQQLKAGDNPYLRYNHADAEFQERLQEDTSFGGNLGRAVFQAKKRVLEPLGLVEEGAKTAPGKKRPVEQSPQEPDSSSGIGKTGQQPAKKRLNFGQTGDSESVPDPRPLGEPPATPAAVGPTTMASGGGAPMADNNEGADGVGNASGNWHCDSTWLGDRVITTSTRTWALPTYNNHLYKQISSASTGASNDNHYFGYSTPWGYFDFNRFHCHFSPRDWQRLINNNWGFRPKRLNFKLFNIQVKEVTTNDGVTTIANNLTSTVQVFSDSEYQLPYVLGSAHQGCLPPFPADVFMIPQYGYLTLNNGSQAVGRSSFYCLEYFPSQMLRTGNNFTFSYTFEEVPFHSSYAHSQSLDRLMNPLIDQYLYYLNRTQNQSGSAQNKDLLFSRGPPAGMSVQPKNWLPGPCYRQQRVSKTKTDNNNSNFTWTGASKYNLNGRESIINPGTAMASHKDDEDKFFPMSGVMIFGKESAGASNTALDNVMITDEEEIKATNPVATERFGTVAVNFQSSSTDPATGDVHAMGALPGMVWQDRDVYLQGPIWAKIPHTDGHFHPSPLMGGFGLKNPPPQILIKNTPVPANPPAEFSATKFASFITQYSTGQVSVEIEWELQKENSKRWNPEVQYTSNYAKSANVDFTVDNNGLYTEPRPIGTRYLTRPL

SEQ ID NO: 666 - DNA, 2208 bp, Artificial Sequence
  Description of Artificial Sequence: Synthetic polynucleotide
atggctgccgatggttatcttccagattggctcgaggacaacctctctgagggcattcgcgagtggtgggacttgaaacctggagccccgaagcccaaagccaaccagcaaaagcaggacgacggccggggtctggtgcttcctggctacaagtacctcggacccttcaacggactcgacaagggggagcccgtcaacgcggcggacgcagcggccctcgagcacgacaaggcctacgaccagcagctcaaagcgggtgacaatccgtacctgcggtataaccacgccgacgccgagtttcaggagcgtctgcaagaagatacgtcttttgggggcaacctcgggcgagcagtcttccaggccaagaagcgggttctcgaacctctcggtctggttgaggaaggcgctaagacggctcctggaaagaaacgtccggtagagcagtcgccacaagagccagactcctcctcgggcatcggcaagacaggccagcagcccgctaaaaagagactcaattttggtcagactggcggctcagagtcagtccccgatccacaacctctcggagaacctccagcaacccccgctgctgtgggacctactacaatggcttcaggcggtggcgcaccaatggcagacaataacgaaggcgccgacggagtgggtaatgcctcaggaaattggcattgcgattccacatggctgggcgacagagtcatcaccaccagcacccgcacctgggccttgcccacctacaataaccacctctacaagcaaatctccagtgcttcaacgggggccagcaacgacaaccactacttcggctacagcaccccctgggggtattttgatttcaacagattccactgccacttttcaccacgtgactggcagcgactcatcaacaacaattggggattccggcccaagagactcaacttcaaactcttcaacatccaagtcaaggaggtcacgacgaatgatggcgtcacaaccatcgctaataaccttaccagcacggttcaagtcttctcggactcggagtaccagcttccgtacgtcctcggctctgcgcaccagggctgcctccctccgttcccggcggacgtgttcatgattccgcaatacggctacctgacgctcaacaatggcagccaagccgtgggacgttcatccttttactgcctggaatatttcccttctcagatgctgagaacgggcaacaactttaccttcagctacacctttgaggaagtgcctttccacagcagctacgcgcacagccagagcctggaccggctgatgaatcctcccatcgaccaatacctgtattacctgaacagaactcaaaatcagtccgggagtgcccaaaacaaggacttgctgtttagccgtgggtctccagctggcatgtctgttcagcccaaaaactggctacctggaccctgttatcggcagcagcgcgtttctaaaacaaaaacagacaacaacaacagcaattttacctggactggtgcttcaaaatataacctcaatgggcgtgaatccatcatcaaccctggcactgctatggcctcacacaaagacgacgaagacaagttctttcccatgagcggtgtcatgatttttggaaaagagagcgccggagcttcaaacactgcattggacaatgtcatgattacagacgaagaggaaattaaagccactaaccctgtggccaccgaaagatttgggaccgtggcagtcaatttccagagcagcagcacagaccctgcgaccggagatgtgcatgctatgggagcattacctggcatggtgtggcaagatagagacgtgtacctgcagggtcccatttgggccaaaattcctcacacagatggacactttcacccgtctcctcttatgggcggctttggactcaagaacccgcctcctcagatcctcatcaaaaacacgcctgttcctgcgaatcctccggcggagttttcagctacaaagtttgcttcattcatcacccaatactccacaggacaagtgagtgtggaaattgaatgggagctgcagaaagaaaacagcaagcgctggaatcccgaagtgcagtacacatccaattatgcaaaatctgccaacgttgactttactgtggacaacaatggactttatactgagcctcgccccattggcacccgttaccttacccgtcccctg

SEQ ID NO: 667 - protein, 736 aa, Artificial Sequence
  Description of Artificial Sequence: Synthetic polypeptide
MAADGYLPDWLEDNLSEGIREWWDLKPGAPKPKANQQKQDDGRGLVLPGYKYLGPFNGLDKGEPVNAADAAALEHDKAYDQQLKAGDNPYLRYNHADAEFQERLQEDTSFGGNLGRAVFQAKKRVLEPLGLVEEGAKTAPGKKRPVEQSPQEPDSSSGIGKTGQQPAKKRLNFGQTGGSESVPDPQPLGEPPATPAAVGPTTMASGGGAPMADNNEGADGVGNASGNWHCDSTWLGDRVITTSTRTWALPTYNNHLYKQISSASTGASNDNHYFGYSTPWGYFDFNRFHCHFSPRDWQRLINNNWGFRPKRLNFKLFNIQVKEVTTNDGVTTIANNLTSTVQVFSDSEYQLPYVLGSAHQGCLPPFPADVFMIPQYGYLTLNNGSQAVGRSSFYCLEYFPSQMLRTGNNFTFSYTFEEVPFHSSYAHSQSLDRLMNPPIDQYLYYLNRTQNQSGSAQNKDLLFSRGSPAGMSVQPKNWLPGPCYRQQRVSKTKTDNNNSNFTWTGASKYNLNGRESIINPGTAMASHKDDEDKFFPMSGVMIFGKESAGASNTALDNVMITDEEEIKATNPVATERFGTVAVNFQSSSTDPATGDVHAMGALPGMVWQDRDVYLQGPIWAKIPHTDGHFHPSPLMGGFGLKNPPPQILIKNTPVPANPPAEFSATKFASFITQYSTGQVSVEIEWELQKENSKRWNPEVQYTSNYAKSANVDFTVDNNGLYTEPRPIGTRYLTRPL

SEQ ID NO: 668 - DNA, 2208 bp, Artificial Sequence
  Description of Artificial Sequence: Synthetic polynucleotide
atggctgccgatggttatcttccagattggctcgaggacaacctctctgagggcattcgcgagtggtgggacttgaaacctggagccccgaagcccaaagccaaccagcaaaagcaggacgacggccggggtctggtgcttcctggctacaagtacctcggacccttcaacggactcgacaagggggagcccgtcaacgcggcggacgcagcggccctcgagcacgacaaggcctacgaccagcagctcaaagcgggtgacaatccgtacctgcggtataaccacgccgacgccgagtttcaagagcgtctgcaagaagatacgtcttttgggggcaacctcgggcgagcagtcttccaggccaagaagcgggttctcgaacctctcggtctggttgaggaaggcgctaagacggctcctggaaagaaacgtccggtagagcagtcgccacaagagccagactcctcctcgggcatcggcaagacaggccagcagcccgctaaaaagagactcaattttggtcagactggcgactcagagtcagtccccgatccgcaacctctcggagaacctccagcaacccccgctgctgtgggacctactacaatggcttcaggcggtggcgcaccaatggcagacaataacgaaggcgccgacggagtgggtaatgcctcaggaaattggcattgcgattccacatggctgggcgacagagtcatcaccaccagcacccgcacctgggccttgcccacctacaataaccacctctacaagcaaatctccagtgcttcaacgggggccagcaacgacaaccactacttcggctacagcaccccctgggggtattttgatttcaacagattccactgccacttttcaccacgtgactggcagcgactcatcaacaacaattggggattccggcccaagagactcaacttcaaactcttcaacatccaagtcaaggaggtcacgacgaatgatggcgtcacaaccatcgctaataaccttaccagcacggttcaagtcttctcggactcggagtaccagcttccgtacgtcctcggctctgcgcaccagggctgcctccctccgttcccggcggacgtgttcatgattccgcaatacggctacctgacgctcaacaatggcagccaagccgtgggacgttcatccttttactgcctggaatatttcccttctcagatgctgagaacgggcaacaactttaccttcagctacacctttgaggaagtgcctttccacagcagctacgcgcacagccagagcctggaccggctgatgaatcctctcatcgaccaatacctgtattacctgaacagaactcaaaatcagtccggaagtgcccaaaacaaggacttgctgtttagccgtgggtctccagctggcatgtctgttcagcccaaaaactggctacctggaccctgttatcggcagcagcgcgtttctaaaacaaaaacagacaacaacaacagcaattttacctggactggtgcttcaaaatataacctcaatgggcgtgaatccatcatcaaccctggcactgctgtggcctcacacaaagacgacgaagacaagttctttcccatgagcggtgtcatgatttttggaaaagagagcgccggagcttcaaacactgcattggacaatgtcatgattacagacgaagaggaaattaaagccactaaccctgtggccaccgaaagatttgggaccgtggcagtcaatttccagagcagcagcacagaccctgcgaccggagatgtgcatgctatgggagcattacctggcatggtgtggcaagatagagacgtgtacctgcagggtcccatttgggccaaaattcctcacacagatggacactttcacccgtctcctcttatgggcggctttggactcaagaacccgcctcctcagatcctcatcaaaaacacgcctgttcctgcgaatcctccggcggagttttcagctacaaagtttgcttcattcatcacccaatactccacaggacaagtgagtgtggaaattgaatgggagctgcagaaagaaaacagcaagcgctggaatcccgaagtgcagtacacatccaattatgcaaaatctgccaacgttgattttactgtggacaacaatggactttatactgagcctcgccccattggcacccgttaccttacccgtcccctg

SEQ ID NO: 669 - protein, 736 aa, Artificial Sequence
  Description of Artificial Sequence: Synthetic polypeptide
MAADGYLPDWLEDNLSEGIREWWDLKPGAPKPKANQQKQDDGRGLVLPGYKYLGPFNGLDKGEPVNAADAAALEHDKAYDQQLKAGDNPYLRYNHADAEFQERLQEDTSFGGNLGRAVFQAKKRVLEPLGLVEEGAKTAPGKKRPVEQSPQEPDSSSGIGKTGQQPAKKRLNFGQTGDSESVPDPQPLGEPPATPAAVGPTTMASGGGAPMADNNEGADGVGNASGNWHCDSTWLGDRVITTSTRTWALPTYNNHLYKQISSASTGASNDNHYFGYSTPWGYFDFNRFHCHFSPRDWQRLINNNWGFRPKRLNFKLFNIQVKEVTTNDGVTTIANNLTSTVQVFSDSEYQLPYVLGSAHQGCLPPFPADVFMIPQYGYLTLNNGSQAVGRSSFYCLEYFPSQMLRTGNNFTFSYTFEEVPFHSSYAHSQSLDRLMNPLIDQYLYYLNRTQNQSGSAQNKDLLFSRGSPAGMSVQPKNWLPGPCYRQQRVSKTKTDNNNSNFTWTGASKYNLNGRESIINPGTAVASHKDDEDKFFPMSGVMIFGKESAGASNTALDNVMITDEEEIKATNPVATERFGTVAVNFQSSSTDPATGDVHAMGALPGMVWQDRDVYLQGPIWAKIPHTDGHFHPSPLMGGFGLKNPPPQILIKNTPVPANPPAEFSATKFASFITQYSTGQVSVEIEWELQKENSKRWNPEVQYTSNYAKSANVDFTVDNNGLYTEPRPIGTRYLTRPL

SEQ ID NO: 670 - DNA, 2208 bp, Artificial Sequence
  Description of Artificial Sequence: Synthetic polynucleotide
atggctgccgatggttatcttccagattggctcgaggacaacctctctgagggcattcgcgagtggtgggacttgaaacctggagccccgaagcccaaagccaaccagcaaaagcaggacgacggccggggtctggtgcttcctggctacaagtacctcggacccttcaacggactcgacaagggggagcccgtcaacgcggcggacgcagcggccctcgagcacgacaaggcctacgaccagcagctcaaagcgggtgacaatccgtacctgcggtataaccacgccgacgccgagtttcaggagcgtctgcaagaagatacgtcttttgggggcaacctcgggcgagcagtcttccaggccaagaagcgggttctcgaacctctcggtctggttgaggaaggcgctaagacggctcctggaaagaaacgtccggtagagcagtcgccacaagagccagactcctcctcgggcatcggcaagacaggccagcagcccgctaaaaagagactcaattttggtcagactggcgactcagagtcagtccccgatccacaacctctcggagaacctccagcaacccccgctgctgtgggacctactacaatggcttcaggcggtggcgcaccaatggcagacaataacgaaggcgccgacggagtgggtaatgcctcaggaaattggcattgcgattccacatggctgggcgacagagtcatcaccaccagcacccgcacctgggccttgcccacctacaataaccacctctacaagcaaatctccagtgcttcaacgggggccagcaacgacaaccactacttcggctacagcaccccctgggggtattttgatttcaacagattccactgccacttttcaccacgtgactggcagcaactcatcaacaacaattggggattccggcccaagagactcaacttcaaactcttcaacatccaagtcaaggaggtcacgacgaatgatggcgtcacaaccatcgctaataaccttaccagcacggttcaagtcttctcggactcggagtaccagcttccgtacgtcctcggctctgcgcaccagggctgcctccctccgttcccggcggacgtgttcatgattccgcaatacggctacctgacgctcaacaatggcagccaagccgtgggacgttcatccttttactgcctggaatatttcccttctcagatgctgagaacgggcaacaactttaccttcagctacacctttgaggaagtgcctttccacagcagctacgcgcacagccagagcctggaccggctgatgaatcctctcatcgaccaatacctgtattacctgaacagaactcaaaatcagtccggaagtgcccaaaacaaggacttgctgtttagccgtgggtctccagctggcatgtctgttcagcccaaaaactggctacctggaccctgttatcggcagcagcgcgtttctaaaacaaaaacagacaacaacaacagcaattttacctggactggtgcttcaaaatataacctcaatgggcgtgaatccatcatcaaccctggcactgctatggcctcacacaaagacgacgaagacaagttctttcccatgagcggtgtcatgatttttggaaaagagagcgccggagcttcaaacactgcattggacaatgtcatgattacagacgaagaggaaattaaagccactaaccctgtggccaccgaaagatttgggaccgtggcagtcaatttccagagcaccagcacagaccctgcgaccggagatgtgcatgctatgggagcattacctggcatggtgtggcaagatagagacgtgtacctgcagggtcccatttgggccaaaattcctcacacagatggacactttcacccgtctcctcttatgggcggctttggactcaagaacccgcctcctcagatcctcatcaaaaacacgcctgttcctgcgaatcctccggcggagttttcagctacaaagtttgcttcattcatcacccaatactccacaggacaagtgagtgtggaaattgaatgggagctgcagaaagaaaacagcaagcgctggaatcccgaagtgcagtacacatccaattatgcaaaatctgccgacgttgattttactgtggacaacaatggactttatactgagcctcgccccattggcacccgttaccttacccgtcccctg

SEQ ID NO: 671 - protein, 736 aa, Artificial Sequence
  Description of Artificial Sequence: Synthetic polypeptide
MAADGYLPDWLEDNLSEGIREWWDLKPGAPKPKANQQKQDDGRGLVLPGYKYLGPFNGLDKGEPVNAADAAALEHDKAYDQQLKAGDNPYLRYNHADAEFQERLQEDTSFGGNLGRAVFQAKKRVLEPLGLVEEGAKTAPGKKRPVEQSPQEPDSSSGIGKTGQQPAKKRLNFGQTGDSESVPDPQPLGEPPATPAAVGPTTMASGGGAPMADNNEGADGVGNASGNWHCDSTWLGDRVITTSTRTWALPTYNNHLYKQISSASTGASNDNHYFGYSTPWGYFDFNRFHCHFSPRDWQQLINNNWGFRPKRLNFKLFNIQVKEVTTNDGVTTIANNLTSTVQVFSDSEYQLPYVLGSAHQGCLPPFPADVFMIPQYGYLTLNNGSQAVGRSSFYCLEYFPSQMLRTGNNFTFSYTFEEVPFHSSYAHSQSLDRLMNPLIDQYLYYLNRTQNQSGSAQNKDLLFSRGSPAGMSVQPKNWLPGPCYRQQRVSKTKTDNNNSNFTWTGASKYNLNGRESIINPGTAMASHKDDEDKFFPMSGVMIFGKESAGASNTALDNVMITDEEEIKATNPVATERFGTVAVNFQSTSTDPATGDVHAMGALPGMVWQDRDVYLQGPIWAKIPHTDGHFHPSPLMGGFGLKNPPPQILIKNTPVPANPPAEFSATKFASFITQYSTGQVSVEIEWELQKENSKRWNPEVQYTSNYAKSADVDFTVDNNGLYTEPRPIGTRYLTRPL

SEQ ID NO: 672 - DNA, 2208 bp, Artificial Sequence
  Description of Artificial Sequence: Synthetic polynucleotide
atggctgccgatggttatcttccagattggctcgaggacaacctctctgagggcattcgcgagtggtgggacttgaaacctggagccccgaagcccaaagccaaccagcaaaagcaggacgacggccggggtctggtgcttcctggctacaagtacctcggacccttcaacggactcgacaagggggagcccgtcaacgcggcggacgcagcggccctcgagcacgacaaggcctacgaccagcagctcaaagcgggtgacaatccgtacctgcggtataaccacgccgacgccgagtttcaagagcgtctgcaagaagatacgtcttttgggggcaacctcgggcgagcagtcttccaggccaagaagcgggttctcgaacctctcggtctggttgaggaaggcgctaagacggctcctggaaagaaacgtccggtagagcagtcgccacaagagccagactcctcctcgggcatcggcaagacaggccagcagcccgctaaaaagagactcaattttggtcagactggcgactcagagtcagtccccgatccgcaacctctcggagaacctccagcaacccccgctgctgtgggacctactacaatggcttcaggcggtggcgcaccaatggcagacaataacgaaggcgccgacggagtgggtaatgcctcaggaaattggcattgcgattccacatggctgggcgacagagtcatcaccaccagcacccgcacctgggccttgcccacctacaataaccacctctacaagcaaatctccagtgcttcaacgggggccagcaacgacaaccactacttcggctacagcaccccctgggggtattttgatttcaacagattccactgccacttttcaccacgtgactggcagcgactcatcaacaacaattggggattccggcccaagagactcaacttcaaactcttcaacatccaagtcaaggaggtcacgacgaatgatggcgtcacaaccatcgctaataaccttaccagcacggttcaagtcttctcggactcggagtaccagcctccgtacgtcctcggctctgcgcaccagggctgcctccctccgttcccggcggacgtgttcatgattccgcaatacggccacctgacgctcaacaatggcagccaagccgtgggacgttcatccttttactgcctggaatatttcccttctcagatgctgagaacgggcaacaactttaccttcagctacacctttgaggaagtgcctttccacagcagctacgcgcacagccagagcctggaccggctgacgaatcctctcatcgaccaatacctgtattacctgaacagaactcaaaatcagtccggaagtgcccaaaacaaggacttgctgtttagccgtgggtctccagctggcatgtctgttcagcccaaaaactggctacctggaccctgttatcggcagcagcgcgtttctaaaacaaaaacagacaacaacaacagcaattttacctggactggtgcttcaaaatataacctcaatgggcgtgaatccatcatcaaccctggcactgctatggcctcacacaaagacgacgaagacaagttctttcccatgagcggtgtcatgatttttggaaaagagagcgccggagcttcaaacactgcattggacaatgtcatgattacagacgaagaggaaattaaagccactaaccctgtggccaccgaaagatttgggaccgtggcagtcaatttccagagcagcagcacagaccctgcgaccggagatgtgcatgctatgggagcattacctggcatggtgtggcaagatagagacgtgtacctgcagggtcccatttgggccaaaattcctcacacagatggacactttcacccgtctcctcttatgggcggctttggactcaagaacccgcctcctcagatcctcatcaaaaacacgcctgttcctgcgaatcctccggcggagttttcagctacaaagtttgcttcattcatcacccaatactccacaggacaagtgagtgtggaaattgaatgggagctgcagaaagaaaacagcaagcgctggaatcccgaagtgcagtacacatccaattatgcaaaatctgccaacgttgattttactgtggacaacaatggactttatactgagcctcgccccattggcacccgttaccttacccgtcccctg

SEQ ID NO: 673 - protein, 736 aa, Artificial Sequence
  Description of Artificial Sequence: Synthetic polypeptide
MAADGYLPDWLEDNLSEGIREWWDLKPGAPKPKANQQKQDDGRGLVLPGYKYLGPFNGLDKGEPVNAADAAALEHDKAYDQQLKAGDNPYLRYNHADAEFQERLQEDTSFGGNLGRAVFQAKKRVLEPLGLVEEGAKTAPGKKRPVEQSPQEPDSSSGIGKTGQQPAKKRLNFGQTGDSESVPDPQPLGEPPATPAAVGPTTMASGGGAPMADNNEGADGVGNASGNWHCDSTWLGDRVITTSTRTWALPTYNNHLYKQISSASTGASNDNHYFGYSTPWGYFDFNRFHCHFSPRDWQRLINNNWGFRPKRLNFKLFNIQVKEVTTNDGVTTIANNLTSTVQVFSDSEYQPPYVLGSAHQGCLPPFPADVFMIPQYGHLTLNNGSQAVGRSSFYCLEYFPSQMLRTGNNFTFSYTFEEVPFHSSYAHSQSLDRLTNPLIDQYLYYLNRTQNQSGSAQNKDLLFSRGSPAGMSVQPKNWLPGPCYRQQRVSKTKTDNNNSNFTWTGASKYNLNGRESIINPGTAMASHKDDEDKFFPMSGVMIFGKESAGASNTALDNVMITDEEEIKATNPVATERFGTVAVNFQSSSTDPATGDVHAMGALPGMVWQDRDVYLQGPIWAKIPHTDGHFHPSPLMGGFGLKNPPPQILIKNTPVPANPPAEFSATKFASFITQYSTGQVSVEIEWELQKENSKRWNPEVQYTSNYAKSANVDFTVDNNGLYTEPRPIGTRYLTRPL

SEQ ID NO: 674 - DNA, 2208 bp, Artificial Sequence
  Description of Artificial Sequence: Synthetic polynucleotide
atggctgccgatggttatcttccagattggctcgaggacaacctctctgagggcattcgcgagtggtgggacttgaaacctggagccccgaagcccaaagccaaccagcaagagcaggacgacggccggggtctggtgcttcctggctacaagtacctcggacccttcaacggactcgacaagggggagcccgtcaacgcggcggacgcagcggccctcgagcacgacaaggcctacgaccagcagctcaaagcgggtgacaatccgtacctgcggtataaccacgccgacgccgagtttcaggagcgtctgcaagaagatacgtcttttgggggcaacctcgggcgagcagtcttccaggccaagaagcgggttctcgaacctctcggtctggttgaggaaggcgctaagacggctcctggaaagaaacgtccggtagagcagtcgccacaagagccagactcctcctcgggcatcggcaagacaggccagcagcccgctaaaaagagactcaattttggtcagactggcgactcagagtcagtccccgatccacaacctctcggagaacctccagcaacccccgctgctgtgggacctactacaatggcttcaggcggtggcgcaccaatggcagacaataacgaaggcgccgacggagtgggtaatgcctcaggaaattggcattgcgattccacatggctgggcgacagagtcatcaccaccagcacccgcacctgggccttgcccacctacaataaccacctctacaagcaaatctccagtgcttcaacgggggccagcaacgacaaccactacttcggctacagcaccccctgggggtattttgatttcaacagattccactgccacttttcaccacgtgactggcagcgactcatcaacaacaattggggattccggcccaagagactcaacttcaaactcttcaacatccaagtcaaggaggtcacgacgaatgatggcgtcacaaccatcgctaataaccttaccagcacggttcaagtcttctcggactcggagtaccagcttccgtacgtcctcggctctgcgcaccagggctgcctccctccgttcccggcggacgtgttcatgattccgcaatacggctacctgacgctcaacaatggcagccaagccgtgggacgttcatccttttactgcctggaatatttcccttctcagatgctgagaacgggcaacaactttaccttcagctacacctttgaggaagtgcctttccacagcagctacgcgcacagccagagcctggaccggctgatgaatcctctcatcgaccaatacctgtattacctgaacagaactcaaaatcagtccggaagtgcccaaaacaaggacttgctgtttagccgtgggtctccagctggcatgtctgttcagcccaaaaactggctacctggaccctgttatcggcagcagcgcgtttctaaaacaaaaacagacaacaacaacagcaattttacctggactggtgcttcaaaatataacctcaatgggcgtgaatccatcatcaaccctggcactgctatggcctcacacaaagacgacgaagacaagttctttcccatgagcggtgtcatgatttttggaaaagagagcgccggagcttcaaacactgcattggacaatgtcatgattacagacgaagaggaaattaaagccactaaccctgtggccaccgaaagatttgggaccgtggcagtcaatttccagagcagcagcacagaccctgcgaccggagatgtgcatgctacgggaacattacctggcatggtgtggcaagatagagacgtgtacctgcagggtcccatttgggccaaaattcctcacacagatggacactttcacccgtctcctcttatgggcggctttggactcaagaacccgcctcctcagatcctcatcaaaaccacgcctgttcctgcgaatcctccggcggagttttcagctacaaagtttgcttcattcatcacccagtactccacaggacaagtgagtgtggaaattgaatgggagctgcagaaagaaaacagcaagcgctggaatcccgaagtgcagtacacatccaattatgcaaaatctgccaacgttgattttactgtggacgacaatggactttatactgagcctcgccccattggcacccgttaccttacccgtcccctg

SEQ ID NO: 675 - protein, 736 aa, Artificial Sequence
  Description of Artificial Sequence: Synthetic polypeptide
MAADGYLPDWLEDNLSEGIREWWDLKPGAPKPKANQQEQDDGRGLVLPGYKYLGPFNGLDKGEPVNAADAAALEHDKAYDQQLKAGDNPYLRYNHADAEFQERLQEDTSFGGNLGRAVFQAKKRVLEPLGLVEEGAKTAPGKKRPVEQSPQEPDSSSGIGKTGQQPAKKRLNFGQTGDSESVPDPQPLGEPPATPAAVGPTTMASGGGAPMADNNEGADGVGNASGNWHCDSTWLGDRVITTSTRTWALPTYNNHLYKQISSASTGASNDNHYFGYSTPWGYFDFNRFHCHFSPRDWQRLINNNWGFRPKRLNFKLFNIQVKEVTTNDGVTTIANNLTSTVQVFSDSEYQLPYVLGSAHQGCLPPFPADVFMIPQYGYLTLNNGSQAVGRSSFYCLEYFPSQMLRTGNNFTFSYTFEEVPFHSSYAHSQSLDRLMNPLIDQYLYYLNRTQNQSGSAQNKDLLFSRGSPAGMSVQPKNWLPGPCYRQQRVSKTKTDNNNSNFTWTGASKYNLNGRESIINPGTAMASHKDDEDKFFPMSGVMIFGKESAGASNTALDNVMITDEEEIKATNPVATERFGTVAVNFQSSSTDPATGDVHATGTLPGMVWQDRDVYLQGPIWAKIPHTDGHFHPSPLMGGFGLKNPPPQILIKTTPVPANPPAEFSATKFASFITQYSTGQVSVEIEWELQKENSKRWNPEVQYTSNYAKSANVDFTVDDNGLYTEPRPIGTRYLTRPL

SEQ ID NO: 676 - DNA, 2208 bp, Artificial Sequence
  Description of Artificial Sequence: Synthetic polynucleotide
atggctgccgatggttatcttccagattggctcgaggacaacctctctgagggcattcgcgagtggtgggacttgaaacctggagccccgaagcccaaagccaaccagcaaaagcaggacgacggccggggtctggtgcttcctggctacaagtacctcggacccttcaacggactcgacaagggggagcccgtcaacgcggcggacgcagcggccctcgagcacgacaaggcctacgaccagcagctcaaagcgggtgacaatccgtacctgcggtataaccacgccgacgccgagtttcaggagcgtctgcaagaagatacgtcttttgggggcaacctcgggcgagcagtcttccaggccaagaagcgggttctcgaacctctcggtctggttgaggaaggcgctaagacggctcctggaaagaaacgtccggtagagcagtcgctacaagagccagactcctcctcgggcatcggcaagacaggccagcagcccgctaaaaagagactcaattttggtcagactggcgactcagagtcagtccccgatccacaacctctcggagaacctccagcaacccccgctgctgtgggacctactacaatggcttcaggcggtggcgcaccaatggcagacaataacgaaggcgccgacggagtgggtaatgcctcaggaaattggcattgcgattccacatggctgggcgacagagtcatcaccaccagcacccgcacctgggccttgcccacctacaataaccacctctacaagcaaatctccagtgcttcaacgggggccagcaacgacaaccactacttcggctacagcaccccctgggggtattttgatttcaacagattccactgccacttttcaccacgtgactggcagcgactcatcaacaacaattggggattccggcccaagagactcaacttcaaactcttcaacatccaagtcaaggaggtcacgacgaatgatggcgtcacaaccatcgctaataaccttaccagcacggttcaagtcttctcggactcggagtaccagcttccgtacgtcctcggctctgcgcaccagggctgcctccctccgttcccggcggacgtgttcatgattccgcaatacggctacctgacgctcaacaatggcagccaagccgtgggacgttcatccttttactgcctggaatatttcccttctcagatgctgagaacgggcaacaactttaccttcagctacacctttgaggaagtgcctttccacagcagctacgcgcacagccagagcctggaccggctgatgaatcctctcatcgaccaatacctgtattacctgaacagaactcaaaatcagtccggaagtgcccaaaacaaggacttgctgtttagccgtgggtctccagctggcatgtctgttcagcccaaaaactggctacctggaccctgttatcggcagcagcgcgtttctaaaacaaaaacagacaacgacaacagcaattttacctggactggtgcttcaaaatataacctcaatgggcgtgaatccatcatcaaccctggcactgctatggcctcacacaaagacgacgaagacaagttctttcccatgagcggtgtcatgatttttggaaaagagagcgccggagcttcaaacactgcattggacaatgtcatgattacagacgaagaggaaattaaagccactaaccctgtggccaccgaaagatttgggaccgtggcagtcaatttccagagcagcagcacagaccctgcgaccggagatgtgcatgctatgggagcattacctggcatggtgtggcaagatagagacgtgtacctgcagggtcccatttgggccaaaattcctcacacagatggacactttcacccgtctcctcttatgggcggctttggactcaagaacccgcctcctcagatcctcatcaaaaacacgcctgttcctgcgaatcctccggcggagttttcagctacaaagtttgcttcattcatcacccaatactccacaggacaagtgagtgtggaaattgaatgggagctgcagaaagaaaacagcaagcgctggaatcccgaagtgcagtacacatccaattatgcaaaatctgccaacgttgattttactgtggacaacaatggactttatactgagcctcgccccattggcacccgttaccttacccgtcccctg

SEQ ID NO: 677 - protein, 736 aa, Artificial Sequence
  Description of Artificial Sequence: Synthetic polypeptide
MAADGYLPDWLEDNLSEGIREWWDLKPGAPKPKANQQKQDDGRGLVLPGYKYLGPFNGLDKGEPVNAADAAALEHDKAYDQQLKAGDNPYLRYNHADAEFQERLQEDTSFGGNLGRAVFQAKKRVLEPLGLVEEGAKTAPGKKRPVEQSLQEPDSSSGIGKTGQQPAKKRLNFGQTGDSESVPDPQPLGEPPATPAAVGPTTMASGGGAPMADNNEGADGVGNASGNWHCDSTWLGDRVITTSTRTWALPTYNNHLYKQISSASTGASNDNHYFGYSTPWGYFDFNRFHCHFSPRDWQRLINNNWGFRPKRLNFKLFNIQVKEVTTNDGVTTIANNLTSTVQVFSDSEYQLPYVLGSAHQGCLPPFPADVFMIPQYGYLTLNNGSQAVGRSSFYCLEYFPSQMLRTGNNFTFSYTFEEVPFHSSYAHSQSLDRLMNPLIDQYLYYLNRTQNQSGSAQNKDLLFSRGSPAGMSVQPKNWLPGPCYRQQRVSKTKTDNDNSNFTWTGASKYNLNGRESIINPGTAMASHKDDEDKFFPMSGVMIFGKESAGASNTALDNVMITDEEEIKATNPVATERFGTVAVNFQSSSTDPATGDVHAMGALPGMVWQDRDVYLQGPIWAKIPHTDGHFHPSPLMGGFGLKNPPPQILIKNTPVPANPPAEFSATKFASFITQYSTGQVSVEIEWELQKENSKRWNPEVQYTSNYAKSANVDFTVDNNGLYTEPRPIGTRYLTRPL

SEQ ID NO: 678 - DNA, 2208 bp, Artificial Sequence
  Description of Artificial Sequence: Synthetic polynucleotide
atggctgccgatggttatcttccagattggctcgaggacaacctctctgagggcattcgcgagtggtgggacttgaaacctggagccccgaaacctaaagccaaccagcaaaagcaggacgacggccggggtctggtgcttcctggctacaagtacctcggacccttcaacggactcgacaagggggagcccgtcaacgcggcggacgcagcggccctcgagcacgacaaggcctacgaccagcagctcaaagcgggtgacaatccgtacctgcggtataaccacgccgacgccgagtttcaggagcgtctgcaagaagatacgtcttttgggggcaacctcgggcgagcagtcttccaggccaagaagcgggttctcgaaccttttggtctggttgaggaaggcgctaagacggctcctggaaagaaacgtccggtagagcagtcgccacaagagccagactcctcctcgggcatcggcaagacaggccagcagcccgctaaaaagagactcaattttggtcagactggcgactcagagtcagtccccgacccacaacctctcggagaacctccagcaacccccgctgctgtgggacctactacaatggcttcaggcggtggcgcaccaatggcagacaataacgaaggcgccgacggagtgggtaatgcctcaggaaattggcattgcgattccacatggctgggcgacagagtcatcaccaccagcacccgcacctgggccttgcccacctacaataaccacctctacaagcaaatctccagtgcttcaacgggggccagcaacgacaaccactacttcggctacagcaccccctgggggtattttgatttcaacagattccactgccacttttcaccacgtgactggcagcgactcatcaacaacaattggggattccggcccaagagactcaacttcaagctcttcaacatccaagtcaaggaggtcacgacgaacgatggcgtcacgaccatcgctaataaccttaccagcacggttcaagtcttctcggattcagagtaccaactgccgtacgtcctcggctctgcgcaccagggctgcctccctccgttcccggcggacgtgtttatgattccgcagtacggctacctaacgctcaacaatggcagccaggccgtgggacgttcatccttttactgcccggaatatttcccttctcagatgctgagaacgggcaacaactttaccttcagctacacctttgaggaagtgcctttccacagcagctacgcgcacagccagagcctggaccggctgatgaatcctctcatcgaccaatacctgtattacctgaacagaactcaaaatcagtccggaagtgcccaaaacaaggacttgctgtttagccgtgggtctccagctggcatgtctgttcagcccaaaaactggctacctggaccctgttatcggcagcagcgcgtttctaaaacaaaaacagacaacaacaacagcaattttacctggactggtgcttcaaaatataacctcaatgggcgtgaatccatcatcaaccctggcactgctatggcctcacacaaagacgacaaagacaagttctttcccatgagcggtgtcatgatttttggaaaagagagcgccggagcttcaaatactgcattggacaatgtcatgatcacagatgaagaggaaattaaagccactaaccctgtggccaccgaaagatttgggaccgtggcagtcaatttccagagcagcaacacagaccccgcgaccggagatgtgcatgttatgggagccttacctggcatggtgtggcaagacagagacgtatacctgcagggtcccatttgggccaaaattcctcacacggatggacactttcacccgtctcctctcatgggcggctttggacttaagcacccgcctcctcaaatcctcatcaaaaacacgcctgttcctgcgaatcctccggcagagttttcggctacaaagtttgcttcattcatcacccagtactccacaggacaagtgagtgtggaaattgaatgggagctgcagaaagaaaacagcaagcgctggaatcccgaagtgcagtacacatccaattatgcaaaatctgccaacgttgatttcactgtggacaacaatggactttatactgagcctcgccccattggcacccgttaccttacccgtcccttg

SEQ ID NO: 679 - protein, 736 aa, Artificial Sequence
  Description of Artificial Sequence: Synthetic polypeptide
MAADGYLPDWLEDNLSEGIREWWDLKPGAPKPKANQQKQDDGRGLVLPGYKYLGPFNGLDKGEPVNAADAAALEHDKAYDQQLKAGDNPYLRYNHADAEFQERLQEDTSFGGNLGRAVFQAKKRVLEPFGLVEEGAKTAPGKKRPVEQSPQEPDSSSGIGKTGQQPAKKRLNFGQTGDSESVPDPQPLGEPPATPAAVGPTTMASGGGAPMADNNEGADGVGNASGNWHCDSTWLGDRVITTSTRTWALPTYNNHLYKQISSASTGASNDNHYFGYSTPWGYFDFNRFHCHFSPRDWQRLINNNWGFRPKRLNFKLFNIQVKEVTTNDGVTTIANNLTSTVQVFSDSEYQLPYVLGSAHQGCLPPFPADVFMIPQYGYLTLNNGSQAVGRSSFYCPEYFPSQMLRTGNNFTFSYTFEEVPFHSSYAHSQSLDRLMNPLIDQYLYYLNRTQNQSGSAQNKDLLFSRGSPAGMSVQPKNWLPGPCYRQQRVSKTKTDNNNSNFTWTGASKYNLNGRESIINPGTAMASHKDDKDKFFPMSGVMIFGKESAGASNTALDNVMITDEEEIKATNPVATERFGTVAVNFQSSNTDPATGDVHVMGALPGMVWQDRDVYLQGPIWAKIPHTDGHFHPSPLMGGFGLKHPPPQILIKNTPVPANPPAEFSATKFASFITQYSTGQVSVEIEWELQKENSKRWNPEVQYTSNYAKSANVDFTVDNNGLYTEPRPIGTRYLTRPL

SEQ ID NO: 680 - DNA, 2208 bp, Artificial Sequence
  Description of Artificial Sequence: Synthetic polynucleotide
atggctgccgatggttatcttccagattggctcgaggacaacctctctgagggcattcgcgagtggtgggacttgaaacctggagccccgaaacctaaagccaaccagcaaaagcaggacgacggccggggtctggtgcttcctggctacaagtacctcggacccttcaacggactcgacaagggggagcccgtcaacgcggcggacgcagcggccctcgagcacgacaaggcctacgaccagcagctcaaagcgggtgacaatccgtacctgcggtataaccacgccgacgccgagtttcaggagcgtctacaagaagatacgtcttttgggggcaacctcgggcgagcagtcttccaggccaagaagcgggttctcgaaccttttggtctggttgaggaaggcgctaagacggctcctggaaagaaacgtccggtagagcagtcgccacaagagccagactcctcctcgggcatcggcaagacaggccagcagcccgctaaaaagagactcaattttggtcagactggcgactcagagtcagtccccgacccacaacctctcggagaacctccagcaacccccgctgctgtgggacctactacaatggcttcaggcggtggcgcaccaatggcagacaataacgaaggcgccgacggagtgggtaatgcctcaggaaattggcattgcgattccacatggctgggcgacagagtcatcaccaccagcacccgcacctgggccttgcccacctacaataaccacctctacaagcaaatctccagtgcttcaacgggggccagcaacgacaaccactacttcggctacagcaccccctgggggtattttgatttcaacagattccactgccacttttcaccacgtgactggcagcgactcatcaacaacaattggggattccggcccaagagactcaacttcaagctcttcaacatccaagtcaaggaggtcacgacgaacgatggcgtcacgaccatcgctaataaccttaccagcacggttcaagtcttctcggattcagagtaccaactgccgtacgtcctcggctctgcgcaccagggctgcctccctccgttcccggcggacgtgttcatgattccgcagtacggctacctaacgctcaacaatggcagccaggccgtgggacgttcatccttttactgcctggaatatttcccttctcagatgctgagaacgggcaacaactttaccttcagctacacctttgaggaagtgcctttccacagcagctacgcgcacagccagagcctggaccggctgatgaatcctctcatcgaccaatacctgtattacctgaacagaactcaaaatcagtccggaagtgcccaaaacaaggacttgctgtttagccgtgggtctccagctggcatgtctgttcagcccaaaaactggctacctggaccctgttatcggcagcagcgcgtttctaaaacaaaaacagacaacaacaacagcaattttacctggactggtgcttcaaaatataacctcaatgggcgtgaatccatcatcaaccctggcactgctatggcctcacacaaagacgacaaagacaagttctttcccatgagcggtgtcatgatttttggaaaagagagcgccggagcttcaaatactgcattggacaatgtcatgatcacagatgaagaggaaattaaagccactaaccctgtggccaccgaaagatttgggaccgtggcagtcaatttccagagcagcgacacagaccccgcgaccggagatgtgcatgttatgggagccttacctggcatggtgtggcaagacagagacgtatacctgcagggtcccatttgggccaaaattcctcacacggatggacactttcacccgtctcctctcatgggcggctttggacttaagcacccgcctcctcaaatcctcatcaaaaacacgcctgttcctgcgaatcctccggcagagttttcggctacaaagtttgcttcattcatcacccagtactccacaggacaagtgagtgtggaaattgaatgggagctgcagaaagaaaacagcaagcgctggaatcccgaagtgcagtacacatccaattatgcaaaatctgccaacgttgatttcactgtggacaacaatggactttatactgagcctcgccccattggcacccgttaccttacccgtcccttg

SEQ ID NO: 681 - protein, 736 aa, Artificial Sequence
  Description of Artificial Sequence: Synthetic polypeptide
MAADGYLPDWLEDNLSEGIREWWDLKPGAPKPKANQQKQDDGRGLVLPGYKYLGPFNGLDKGEPVNAADAAALEHDKAYDQQLKAGDNPYLRYNHADAEFQERLQEDTSFGGNLGRAVFQAKKRVLEPFGLVEEGAKTAPGKKRPVEQSPQEPDSSSGIGKTGQQPAKKRLNFGQTGDSESVPDPQPLGEPPATPAAVGPTTMASGGGAPMADNNEGADGVGNASGNWHCDSTWLGDRVITTSTRTWALPTYNNHLYKQISSASTGASNDNHYFGYSTPWGYFDFNRFHCHFSPRDWQRLINNNWGFRPKRLNFKLFNIQVKEVTTNDGVTTIANNLTSTVQVFSDSEYQLPYVLGSAHQGCLPPFPADVFMIPQYGYLTLNNGSQAVGRSSFYCLEYFPSQMLRTGNNFTFSYTFEEVPFHSSYAHSQSLDRLMNPLIDQYLYYLNRTQNQSGSAQNKDLLFSRGSPAGMSVQPKNWLPGPCYRQQRVSKTKTDNNNSNFTWTGASKYNLNGRESIINPGTAMASHKDDKDKFFPMSGVMIFGKESAGASNTALDNVMITDEEEIKATNPVATERFGTVAVNFQSSDTDPATGDVHVMGALPGMVWQDRDVYLQGPIWAKIPHTDGHFHPSPLMGGFGLKHPPPQILIKNTPVPANPPAEFSATKFASFITQYSTGQVSVEIEWELQKENSKRWNPEVQYTSNYAKSANVDFTVDNNGLYTEPRPIGTRYLTRPL

SEQ ID NO: 682 - DNA, 2208 bp, Artificial Sequence
  Description of Artificial Sequence: Synthetic polynucleotide
atggctgccgatggttatcttccagattggctcgaggacaacctctctgagggcattcgcgagtggtgggacttgaaacctggagccccgaaacctaaagccaaccagcaaaagcagggcgacggccggggtctggtgcttcctggctacaagtacctcggacccttcaacggactcgacaagggggagcccgtcaacgcggcggacgcagcggccctcgagcacgacaaggcctacgaccagcagctcaaagcgggtgacaatccgtacctgcggtataaccacgccgacgccgagtttcaggagcgtctgcaagaagatacgtcttttgggggcaacctcgggcgagcagtcttccaggccaagaagcgggttctcgaaccttttggtctggttgaggaaggcgctaagacggctcctggaaagaaacgtccggtagagcagtcgccacaagagccagactcctcctcgggcatcggcaagacaggccagcagcccgctaaaaagagactcaattttggtcagactggcgactcagagtcagtccccgacccacaacctctcggagaacctccagcaacccccgctgctgtgggacctactacaatggcttcaggcggtggcgcaccaatggcagacaataacgaaggcgccgacggagtgggtaatgcctcaggaaattggcattgcgattccacatggctgggcgacagagtcatcaccaccaacactcgcacctgggccttgcccacctacaataaccacctctacaagcaaatctccagtgcttcaacgggggccagcaacgacaaccactacttcggctacagcaccccctgggggtattttgatttcaacagattccactgccacttttcaccacgtgactggcagcgactcatcaacaacaattggggattccggcccaagagactcaacttcaagctcttcaacatccaagtcaaggaggtcacgacgaacgatggcgtcacgaccatcgctaataaccttaccagcacggttcaagtcttctcggattcagagtaccaactgccgtacgtcctcggctctgcgcaccagggctgcctccctccgttcccggcggacgtgttcatgattccgcagtacggctacctaacgctcaacaatggcagccaggccgtgggacgttcatccttttactgcctggaatatttcccttctcagatgctgagaacgggcaacaactttaccttcagctacacctttgaggaagtgcctttccacagcagttacgggcacagccagagcctggaccggctgatgaatcttctcatcgaccaatacctgtattacctgaacagaactcaaaatcagtccggaagtgcccaaaacaaggacttgctgtttagccgtgggtctccagctggcatgtttgttcagcccaaaaactggctacctggaccctgttatcggcagcagcgcgtttctaaaacaaaaacagacaacaacaacagcaattttacctggactggtgcttcaaaatataacctcaatgggcgtgaatccatcatcaaccctggcactgctatggcctcacacaaagacgacgaagacaagttctttcccatgagcggtgtcatgatttttggaaaagagagcgccggagcttcaaatactgcattggacaatgtcatgatcacagatgaagaggaaattaaagccactaaccctgtggccaccgaaagatttgggaccgtggcagtcaatttccagagcagcagcacagaccccgcgaccggagatgtgcatgttatgggagccttacctggcatggtgtggcaagacagagacgtatacctgcagggtcccatttgggccaaaattcctcacacggatggacactttcacccgtctcctctcatgggcggctttggacttaagcacccgcctcctcaaatcctcatcaaaaacacgcctgttcctgcgaatcctccggcagagttttcggctacaaagtttgcttcattcatcacccagtactccacaggacaagtgagtgtggaaattgaatgggagctgcagaaagaaaacagcaagcgctggaatcccgaagtgcagtacacatccaattatgcaaaatctgccaacgttgatttcactgtggacaacaatggactttatactgagcctcgccccattggcacccgttaccttacccgtcccttg

SEQ ID NO: 683 - protein, 736 aa, Artificial Sequence
  Description of Artificial Sequence: Synthetic polypeptide
MAADGYLPDWLEDNLSEGIREWWDLKPGAPKPKANQQKQGDGRGLVLPGYKYLGPFNGLDKGEPVNAADAAALEHDKAYDQQLKAGDNPYLRYNHADAEFQERLQEDTSFGGNLGRAVFQAKKRVLEPFGLVEEGAKTAPGKKRPVEQSPQEPDSSSGIGKTGQQPAKKRLNFGQTGDSESVPDPQPLGEPPATPAAVGPTTMASGGGAPMADNNEGADGVGNASGNWHCDSTWLGDRVITTNTRTWALPTYNNHLYKQISSASTGASNDNHYFGYSTPWGYFDFNRFHCHFSPRDWQRLINNNWGFRPKRLNFKLFNIQVKEVTTNDGVTTIANNLTSTVQVFSDSEYQLPYVLGSAHQGCLPPFPADVFMIPQYGYLTLNNGSQAVGRSSFYCLEYFPSQMLRTGNNFTFSYTFEEVPFHSSYGHSQSLDRLMNLLIDQYLYYLNRTQNQSGSAQNKDLLFSRGSPAGMFVQPKNWLPGPCYRQQRVSKTKTDNNNSNFTWTGASKYNLNGRESIINPGTAMASHKDDEDKFFPMSGVMIFGKESAGASNTALDNVMITDEEEIKATNPVATERFGTVAVNFQSSSTDPATGDVHVMGALPGMVWQDRDVYLQGPIWAKIPHTDGHFHPSPLMGGFGLKHPPPQILIKNTPVPANPPAEFSATKFASFITQYSTGQVSVEIEWELQKENSKRWNPEVQYTSNYAKSANVDFTVDNNGLYTEPRPIGTRYLTRPL

SEQ ID NO: 684 - DNA, 2208 bp, Artificial Sequence
  Description of Artificial Sequence: Synthetic polynucleotide
atggctgccgatggttatcttccagattggctcgaggacaacctctctgagggcattcgcgagtggtgggacttgaaacctggagccccgaaacctaaagccaaccagcaaaagcaggacgacggccggggtctggtgcttcctggctacaagtacctcggacccttcaacggactcgacaagggggagcccgtcaacgcggcggacgcagcggccctcgagcacgacaaggcctacgaccagcagctcaaagcgggtgacaatccgtacctgcggtataaccacgccgacgccgagtttcaggagcgtctgcaagaagatacgtcttttgggggcaacctcgggcgagcagtcttccaggccaagaagcgggttctcgaaccttttggtctggttgaggaaggcgctaagacggctcctggaaagaaacgtccggtagagcagtcgccacaagagccagactcctcctcgggcatcggcaagacaggccagcagcccgctaaaaagagactcaattttggtcagactggcgactcagagtcagtccccgacccacaacctctcggagaacctccagcaacccccgctgctgtgggacctactacaatggcttcaggcggtggcgcaccaatggcagacaataacgaaggcgccgacggagtgggtaatgcctcaggaaattggcattgcgattccacatggctgggcgacagagtcatcaccaccaacacccgcacctgggccttgcccacctacaataaccacctctacaagcaaatctccagtgcttcaacgggggccagcaacgacaaccactacttcggctacagcaccccctgggggtattttgatttcaacagattccactgccacttttcaccacgtgactggcagcgactcatcaacaacaattggggattccggcccaagagactcaacttcaagctcttcaacatccaagtcaaggaggtcacgacgaacgatggcgtcacgaccatcgctaataaccttaccagcacggttcaagtcttctcggattcagagtaccaactgccgtacgtcctcggctctgcgcaccagggctgcctccctccgttcccggcggacgtgttcatgattccgcagtacggctacctaatgctcaacaatggcagccaggccgtgggacgttcatccttttactgcctggaatatttcccttctcagatgctgagaacgggcaacaactttaccttcagctacacctttgaggaagtgcctttccacagcagctacgcgcacagccagagcctggaccggctgatgaatcctctcatcgaccaatacctgtattacctgaacagaactcaaaatcagtccggaagtgcccaaaacaaggacttgctgtttagccgtgggtctccagctggcatgtctgttcagcccaaaaactggctacctggaccctgttatcggcagcagcgcgtttctaaaacaaaaacagacaacaacaacagcaattttacctggactggtgcttcaaaatataacctcaatgggcgtgaatccatcatcaaccctggcactgctatggcctcacacaaagacgacgaagacaagttctttcccatgagcggtgtcatgatttttggaaaagagagcgccggagcttcaaatactgcattggacaatgtcatgatcacagatgaagaggaaattaaagccactaaccctgcggccaccgaaagatttgggaccgtggcagtcaatttccagagcagcagcacagaccccgcgaccggagatgtgcatgttatgggagccttacctggcatggtgtggcaagacagagacgtatacctgcagggtcccatttgggccaaaattcctcacacggatggacactttcacccgtctcctctcatgggcggctttggacttaagcacccgcctcctcaaatcctcatcaaaaacacgcctgttcctgcgaatcctccggcagagttttcggctacaaagtttgcttcattcatcacccagtactccacaggacaagtgagtgtggaaattgaatgggagctgcagaaagaaaacagcaagcgctggaatcccgaagtgcagtacacatccaattatgcaaaatctgccaacgttgatttcactgtggacaacaatggactttatactgagcctcgccccattggcacccgttaccttacccgtcccttg

SEQ ID NO: 685 - protein, 736 aa, Artificial Sequence
  Description of Artificial Sequence: Synthetic polypeptide
MAADGYLPDWLEDNLSEGIREWWDLKPGAPKPKANQQKQDDGRGLVLPGYKYLGPFNGLDKGEPVNAADAAALEHDKAYDQQLKAGDNPYLRYNHADAEFQERLQEDTSFGGNLGRAVFQAKKRVLEPFGLVEEGAKTAPGKKRPVEQSPQEPDSSSGIGKTGQQPAKKRLNFGQTGDSESVPDPQPLGEPPATPAAVGPTTMASGGGAPMADNNEGADGVGNASGNWHCDSTWLGDRVITTNTRTWALPTYNNHLYKQISSASTGASNDNHYFGYSTPWGYFDFNRFHCHFSPRDWQRLINNNWGFRPKRLNFKLFNIQVKEVTTNDGVTTIANNLTSTVQVFSDSEYQLPYVLGSAHQGCLPPFPADVFMIPQYGYLMLNNGSQAVGRSSFYCLEYFPSQMLRTGNNFTFSYTFEEVPFHSSYAHSQSLDRLMNPLIDQYLYYLNRTQNQSGSAQNKDLLFSRGSPAGMSVQPKNWLPGPCYRQQRVSKTKTDNNNSNFTWTGASKYNLNGRESIINPGTAMASHKDDEDKFFPMSGVMIFGKESAGASNTALDNVMITDEEEIKATNPAATERFGTVAVNFQSSSTDPATGDVHVMGALPGMVWQDRDVYLQGPIWAKIPHTDGHFHPSPLMGGFGLKHPPPQILIKNTPVPANPPAEFSATKFASFITQYSTGQVSVEIEWELQKENSKRWNPEVQYTSNYAKSANVDFTVDNNGLYTEPRPIGTRYLTRPL

SEQ ID NO: 686 - DNA, 2208 bp, Artificial Sequence
  Description of Artificial Sequence: Synthetic polynucleotide
atggctgccgatggttatcttccagattggctcgaggacaacctctctgagggcattcgcgagtggtgggacttgaaacctggagccccgaaacctaaagccaaccagcaaaagcaggacgacggccggggtctggtgcttcctggctacaagtacctcggacccttcaacggactcgacaagggggagcccgtcaacgcggcggacgcagcggccctcgagcacgacaaggcctacgaccagcagctcaaagcgggtgacaatccgtacctgcggtataaccacgccgacgccgagtttcaggagcgtctgcaagaagatacgtcttttgggggcaacctcgggcgagcagtcttccaggccaagaagcgggttctcgaaccttttggtctggttgaggaaggcgctaagacggctcctggaaagaaacgtccggtagagcagtcgccacaagagccagactcctcctcgggcatcggcaagacgggccagcagcccgctaaaaagagactcaattttggtcagactggcgactcagagtcagtccccgacccacaacctctcggagaacctccagcaacccccgctgctgtgggacctactacaatggcttcaggcggtggcgcaccaatggcagacaataacgaaggcgccgacggagtgggtaatgcctcaggaaattggcattgcgattccacatggctgggcgacagagtcatcaccaccagcacccgcacctgggccttgcccacctacaataaccacctctacaagcaaatctccagtgcttcaacgggggccagcaacgacaaccactacttcggctacagcaccccctgggggtattttgatttcaacagattccactgccacttttcaccacgtgactggcagcgactcatcaacaacaattggggattccggcccaagagactcaacttcaagctcttcaacatccaagtcaaggaggtcacgacgaacgatggcgtcacgaccatcgctaataaccttaccagcacggttcaagtcttctcggattcagagtaccaactgccgtacgtcctcggctctgcgcaccagggctgcctccctccgttcccggcggacgtgttcatgattccgcagtacggctacctaacgctcaacaatggcagccaggccgtgggacgttcatccttttactgcctggaatatttcccttctcagatgctgagaacgggcaacaactttaccttcagctacacctttgaggaagtgcctttccacagcagctacgcgcacagccagagcctggaccggctgatgaatcctctcatcgaccaatacctgtattacctgaacagaactcaaaatcagtccggaagtgcccaaaacaaggacttgctgtttagccgtgggtctccagctggcatgtccgttcagcccaaaaactggctacctggaccctgttatcggcagcagcgcgtttctaaaacaaaaacagacaacaacaacagcaattttacctggactggtgcttcaaaatataacctcaatgggcgtgaatccatcatcaaccctggcactgctatggcctcacacaaagacgacgaagacaagttctttcccatgagcggtgtcatgatttttggaaaagagagcgccggagcttcaaatactgcattggacaatgtcatgatcacagatgaagaggaaattaaagccactaaccctgtggccaccgaaagatttgggaccgtggcagtcaatttccagagcagcagcacagaccccgcgaccggagatgtgcatgttatgggagccttacctggcatggtgtggcaagacagagacgtatacctgcagggtcccatttgggccaaaattcctcacacggatggacactttcacccgtctcctctcatgggcggctttggacttaagcacccgcctcctcaaatcctcatcaaaaacacgcctgttcctgcgaatcctccggcagagttttcggctacaaagtttgcttcattcatcacccagtactccacaggacaagtgagtgtggaaattgaatgggagctgcagaaagaaaacagcaagcgctggaatcccgaagtgcagtacacatccaattatgcaaaatctgccaacgttgatttcactgtggacaacaatggactttatactgagcctcgccccattggcacccgttaccttacccgtcccttg

SEQ ID NO: 687 - protein, 736 aa, Artificial Sequence
  Description of Artificial Sequence: Synthetic polypeptide
MAADGYLPDWLEDNLSEGIREWWDLKPGAPKPKANQQKQDDGRGLVLPGYKYLGPFNGLDKGEPVNAADAAALEHDKAYDQQLKAGDNPYLRYNHADAEFQERLQEDTSFGGNLGRAVFQAKKRVLEPFGLVEEGAKTAPGKKRPVEQSPQEPDSSSGIGKTGQQPAKKRLNFGQTGDSESVPDPQPLGEPPATPAAVGPTTMASGGGAPMADNNEGADGVGNASGNWHCDSTWLGDRVITTSTRTWALPTYNNHLYKQISSASTGASNDNHYFGYSTPWGYFDFNRFHCHFSPRDWQRLINNNWGFRPKRLNFKLFNIQVKEVTTNDGVTTIANNLTSTVQVFSDSEYQLPYVLGSAHQGCLPPFPADVFMIPQYGYLTLNNGSQAVGRSSFYCLEYFPSQMLRTGNNFTFSYTFEEVPFHSSYAHSQSLDRLMNPLIDQYLYYLNRTQNQSGSAQNKDLLFSRGSPAGMSVQPKNWLPGPCYRQQRVSKTKTDNNNSNFTWTGASKYNLNGRESIINPGTAMASHKDDEDKFFPMSGVMIFGKESAGASNTALDNVMITDEEEIKATNPVATERFGTVAVNFQSSSTDPATGDVHVMGALPGMVWQDRDVYLQGPIWAKIPHTDGHFHPSPLMGGFGLKHPPPQILIKNTPVPANPPAEFSATKFASFITQYSTGQVSVEIEWELQKENSKRWNPEVQYTSNYAKSANVDFTVDNNGLYTEPRPIGTRYLTRPL

SEQ ID NO: 688 - DNA, 2208 bp, Artificial Sequence
  Description of Artificial Sequence: Synthetic polynucleotide
  misc_feature (305)..(305): n is a, c, g, or t
atggctgccgatggttatcttccagattggctcgaggacaacctctctgagggcattcgcgagtggtgggacttgaaacctggagccccgaaacctaaagccaaccagcaaaagcaggacgacggccggggtctggtgcttcctggctacaagtacctcggacccttcaacggactcgacaagggggagcccgtcaacgcggcggacgcagcggccctcgagcacgacaaggcctacgaccagcagctcaaagcgggtgacaatccgtacctgcggtataaccacgccgacgccgagtttcaggngcgtctgcaagaagatacgtcttttgggggcaacctcgggcgagcagtcttccaggccaagaagcgggttctcgaaccttttggtctggttgaggaaggcgctaagacggctcctggaaagaaacgtccggtagagcagtcgccacaagagccagactcctcctcgggcatcggcaagacaggccagcagcccgctaaaaagagactcaattttggtcagactggcgactcagagtcagtccccgacccacaacctctcggagaacctccagcaacccccgctgctgtgggacctactacaatggcttcaggcggtggcgcaccaatggcagacaataacgaaggcgccgacggagtgggtaatgcctcaggaaattggcattgcgattccacatggctgggcggcagagtcatcaccaccagcacccgcacctgggccttgcccacctacaataaccacctctacaagcaaatctccagtgcttcaacgggggccagcaacgacaaccactacttcggccacagcaccccctgggggtattttgatttcaacagattccactgccacttttcaccacgtgactggcagcgactcatcaacaacaattggggattccggcccaagagactcaacttcaagctcttcaacatccaagtcaaggaggtcacgacgaacgatggcgtcacgaccatcgctaataaccttaccagcacggttcaagtcttctcggattcagagtaccaactgccgtacgtcctcggctctgcgcaccagggctgcctccctccgtccccggcggacgtgttcatgattccgcagtacggctacctaacactcaacaatggcagccaggccgtgggacgttcatccttttactgcctggaatatttcccttctcagatgctgagaacgggcaacaactttaccttcagctacacctttgaggaagtgcctttccacagcagctacgcgcacagccagagcctggaccggctgatgaatcctctcatcgaccaatacctgtattacctgaacagaactcaaaatcagtccggaagtgcccaaaacaaggacttgctgtttagccgtgggtctccagctggcatgtctgttcagcccaaaaactggctacctggaccctgttatcggcagcagcgcgtttctaaaacaaaaacagacaacaacaacagcaattttacctggactggtgcttcaaaatataacctcaatgggcgtgaatccatcatcaaccctggcactgctatggcctcacacaaagacgacaaagacaagttctttcccatgagcggtgtcatgatttttggaaaagagagcgccggagcttcaaatactgcattggacaatgtcatgatcacagatgaagaggaaattaaagccactaaccctgtggccaccgaaagatttgggaccgtggcagtcaatttccagagcagcaacacagaccccgcgaccggagatgtgcatgttatgggagccttacctggcatggtgtggcaagacagagacgtatacctgcagggtcccatttgggccaaaattcctcacacggatggacactttcacccgtctcctctcatgggcggctttggacttaagcacccgcctcctcaaatcctcatcaaaaacacgcctgttcctgcgaatcctccggcagagttttcggctacaaagtttgcttcattcatcacccagtactccacaggacaagtgagtgtggaaattgaatgggagctgcagaaagaaaacagcaagcgctggaatcccgaagtgcagtacacatccaattatgcaaaatctgccaacgttgatttcactgtggacaacaatggactttatactgagcctcgccccattggcacccgttaccttacccgtcccttg

SEQ ID NO: 689 - protein, 736 aa, Artificial Sequence
  Description of Artificial Sequence: Synthetic polypeptide
  misc_feature (102)..(102): Xaa can be any naturally occurring amino acid
MAADGYLPDWLEDNLSEGIREWWDLKPGAPKPKANQQKQDDGRGLVLPGYKYLGPFNGLDKGEPVNAADAAALEHDKAYDQQLKAGDNPYLRYNHADAEFQXRLQEDTSFGGNLGRAVFQAKKRVLEPFGLVEEGAKTAPGKKRPVEQSPQEPDSSSGIGKTGQQPAKKRLNFGQTGDSESVPDPQPLGEPPATPAAVGPTTMASGGGAPMADNNEGADGVGNASGNWHCDSTWLGGRVITTSTRTWALPTYNNHLYKQISSASTGASNDNHYFGHSTPWGYFDFNRFHCHFSPRDWQRLINNNWGFRPKRLNFKLFNIQVKEVTTNDGVTTIANNLTSTVQVFSDSEYQLPYVLGSAHQGCLPPSPADVFMIPQYGYLTLNNGSQAVGRSSFYCLEYFPSQMLRTGNNFTFSYTFEEVPFHSSYAHSQSLDRLMNPLIDQYLYYLNRTQNQSGSAQNKDLLFSRGSPAGMSVQPKNWLPGPCYRQQRVSKTKTDNNNSNFTWTGASKYNLNGRESIINPGTAMASHKDDKDKFFPMSGVMIFGKESAGASNTALDNVMITDEEEIKATNPVATERFGTVAVNFQSSNTDPATGDVHVMGALPGMVWQDRDVYLQGPIWAKIPHTDGHFHPSPLMGGFGLKHPPPQILIKNTPVPANPPAEFSATKFASFITQYSTGQVSVEIEWELQKENSKRWNPEVQYTSNYAKSANVDFTVDNNGLYTEPRPIGTRYLTRPL

SEQ ID NO: 690 - DNA, 2208 bp, Artificial Sequence
  Description of Artificial Sequence: Synthetic polynucleotide
atggctgccgatggttattttccagattggctcgaggacaacctttctgagggcattcgcgagtggtgggacttgaaacctggagccccgaaacctaaagccaaccagcaaaagcaggacgacggccggggtctggtgcttcctggctacaagtacctcggacccttcaacggactcgacaagggggagcccgtcaacgcggcggacgcagcggccctcgagcacgacaaggcctacgaccagcagctcaaagcgggtgacaatccgtacctgcggtataaccacgccgacgccgagtttcaggagcgtctgcaagaagatacgtcttttgggggcaacctcgggcgagcagtcttccaggccaagaagcgggttctcgaaccttttggtctggttgaggaaggcgctaagacggctcctggaaagaaacgtccggtagagcagtcgccacaagagccagactcctcctcgggcatcggcaggacaggccagcagcccgctaaaaagagactcaattttggtcagactggcgactcagagtcagtccccgacccacaacctctcggagaacctccagcgacccccgctgctgtgggacctactacaatggcttcaggcggtggcgcaccaatggcagacaataacgaaggtgccgacggagtgggtaatgcctcaggaaattggcattgcgattccacatggctgggcgacagagtcatcaccaccagcacccgcacctgggccttgcccacctacaataaccacctctacaagcaaatctccagtgcttcaacgggggccagcaacgacaaccactacttcggctacagcaccccctgggggtattttgatttcaacagattccactgccacttttcaccacgtgactggcagcgactcatcaacaacaattggggattccggcccaagagactcaacttcaagctcttcaacatccaagtcaaggaggtcacgacgaacgatggcgtcacgaccatcgctaataaccttaccagcacggttcaagtcttctcggattcagagtaccaactgccgtacgtcctcggctctgcgcaccagggctgcctccctccgttcccggcggacgtgttcatgattccgcagtacggctacctaacgctcaacaatggcagccaggccgtgggacgttcatccttttactgcctggaatatttcccttctcagatgctgagaacgggcaacaactttaccttcagctacacctttgaggaagtgcctttccacagcagctacgcgcacagccagagcctggaccggctgatgaatcctctcatcgaccaatacctgtattacctgaacagaactcaaaatcagtccggaagtgcccaaaacaaggacttgctgtttagccgtgggtctccagctggcatgtctgttcagcccaaaaactggctacctggaccctgttatcggcagcagcgcgtttctaaaacaaaaacagacaacaacaacagcaattttacctggactggtgcttcaaaatataacctcaatgggcgtgaatccatcatcaaccctggcactgctatggcctcacacaaagacgacgaagacaagttctttcccatgagcggtgtcatgatttttggaaaagagagcgccggagcttcaaatactgcattggacaatgtcatgatcacagatgaagaggaaattaaagccactaaccctgtggccaccgaaagatttgggaccgtggcagtcaatttccagagcagcagcccagaccccgcgaccggagatgtgcatgttatgggagccttacctggcatggtgtggcaagacagagacgtatacctgcagggtcccatttgggccaaaattcctcacacggatggacactttcacccgtctcctctcatgggcggctttggacttaagcacccgcctcctcaaatcctcatcaaaaacacgcctgttcctgcgaatcctccggcagagttttcggctacaaagtttgcttcattcatcacccagtactccacaggacaagtgagtgtggaaattgaatgggagctgcagaaagaaaacagcaagcgctggaatcccgaagtgcagtacacatccaattatgcaaaatctgccaacgttgatttcactgtggacaacaatggactttatagtgagcctcgccccattggcacccgttaccttacccgtcccttg

SEQ ID NO: 691 - protein, 736 aa, Artificial Sequence
  Description of Artificial Sequence: Synthetic polypeptide
MAADGYFPDWLEDNLSEGIREWWDLKPGAPKPKANQQKQDDGRGLVLPGYKYLGPFNGLDKGEPVNAADAAALEHDKAYDQQLKAGDNPYLRYNHADAEFQERLQEDTSFGGNLGRAVFQAKKRVLEPFGLVEEGAKTAPGKKRPVEQSPQEPDSSSGIGRTGQQPAKKRLNFGQTGDSESVPDPQPLGEPPATPAAVGPTTMASGGGAPMADNNEGADGVGNASGNWHCDSTWLGDRVITTSTRTWALPTYNNHLYKQISSASTGASNDNHYFGYSTPWGYFDFNRFHCHFSPRDWQRLINNNWGFRPKRLNFKLFNIQVKEVTTNDGVTTIANNLTSTVQVFSDSEYQLPYVLGSAHQGCLPPFPADVFMIPQYGYLTLNNGSQAVGRSSFYCLEYFPSQMLRTGNNFTFSYTFEEVPFHSSYAHSQSLDRLMNPLIDQYLYYLNRTQNQSGSAQNKDLLFSRGSPAGMSVQPKNWLPGPCYRQQRVSKTKTDNNNSNFTWTGASKYNLNGRESIINPGTAMASHKDDEDKFFPMSGVMIFGKESAGASNTALDNVMITDEEEIKATNPVATERFGTVAVNFQSSSPDPATGDVHVMGALPGMVWQDRDVYLQGPIWAKIPHTDGHFHPSPLMGGFGLKHPPPQILIKNTPVPANPPAEFSATKFASFITQYSTGQVSVEIEWELQKENSKRWNPEVQYTSNYAKSANVDFTVDNNGLYSEPRPIGTRYLTRPL

SEQ ID NO: 692 - DNA, 2208 bp, Artificial Sequence
  Description of Artificial Sequence: Synthetic polynucleotide
atggctgccgatggttatcttccagattggctcgaggacaacctctctgagggcattcgcgagtggtgggacttgaaacctggagccccgaaacctaaagccaaccagcaaaagcaggacgacggccggggtctggtgcttcctggctacaagtacctcggacccttcaacggactcgacaagggggagcccgtcaacgcggcggacgcagcggccctcgagcacgacaaggcctacgaccagcagctcaaagcgggtgacaatccgtacctgcggtataaccacgccgacgccgagtttcaggagcgtctgcaagaagatacgtcttttgggggcaacctcgggcgagcagtcttccaggccaagaagcgggttctcgaaccttttggtctggttgaggaaggcgctaagacggctcctggaaagaaacgtccggtagagcagtcgccacaagagccagactcctcctcgggcatcggcaagacaggccagcagcccgctaaaaagagactcaattttggtcagactggcgactcagagtcagtccccgacccacaacctctcggagaacctccagcaacccccgctgctgtgggacctactacaatggcttcaggcggtggcgcaccaatggcagacaataacgaaggcgccgacggagtgggtaatgcctcaggaaattggcattgcgattccacatggctgggcgacagagtcatcaccaccagcacccgcacctgggccttgcccacctacaataaccacctctacaagcaaacctccagtgcttcaacgggggccagcaacgacaaccactacttcggctacagcaccccctgggggtattttgatttcaacagattccactgccacttttcaccacgtgactggcagcgactcatcaacaacaattggggattccggcccaagagactcaacttcaagctcttcaacatccaagtcaaggaggtcacgacgaacgatggcgtcacgaccatcgctaataaccttaccagcacggttcaagtcttctcggattcagagtaccaactgccgtacgtcctcggctctgcgcaccagggctgcctccctccgttcccggcggacgtgttcatgattccgcagtacggctacctaacgctcaacaatggcagccaggccgtgggacgttcatccttttactgcctggaatatttcccttctcagatgctgagaacgggcaacaactttaccttcagctacacctttgaggaagtgcctttccacagcagctacgcgcacagccagagcctggaccggctgatgaatcctctcatcgaccaatacctgtattacctgaacagaactcaaaatcagtccggaagtgcccaaaacaaggacttgctgtttagccgtgggtctccagctggcatgtctgttcagcccaaaaactggctacctggaccctgttatcggcagcagcgcgtttctaaaacaaaaacagactacaacaacagcaattttacctggactggtgcttcaaaatataacctcaatgggcgtgaatccatcatcaaccctggcactgctatggcctcacacaaagacgacgaagacaagttctttcccatgagcggtgtcatgatttttggaaaagagagcgccggagcttcaaatactgcattggacaatgtcatgatcacagatgaagaggaaattaaagccactaaccctgtggccaccgaaagatttgggaccgtggcagtcaatttccagagcagcagcacagaccccgcgaccggagatgtgcatgttatgggagccttacctggcatggtgtggcaagacagagacgtatacctgcagggtcccatttgggccaaaattcctcacacggatggacactttcacccgtctcctctcatgggcggctttggacttaagcacccgcctcctcaaatcctcatcaaaaacacgcctgttcctgcgaatcctccggcagagttttcggctacaaagtttgcttcattcatcacccagtactccacaggacaagtgagtgtggaaattgaatgggagctgcagaaagaaaacagcaagcgctggaatcccgaagtgcagtacacatccaattatgcaaaatctgccaacgttgatttcactgtggacaacaatggactttatactgagcctcgccccattggcacccgttaccttacccgtcccttg

SEQ ID NO: 693 - protein, 736 aa, Artificial Sequence
  Description of Artificial Sequence: Synthetic polypeptide
MAADGYLPDWLEDNLSEGIREWWDLKPGAPKPKANQQKQDDGRGLVLPGYKYLGPFNGLDKGEPVNAADAAALEHDKAYDQQLKAGDNPYLRYNHADAEFQERLQEDTSFGGNLGRAVFQAKKRVLEPFGLVEEGAKTAPGKKRPVEQSPQEPDSSSGIGKTGQQPAKKRLNFGQTGDSESVPDPQPLGEPPATPAAVGPTTMASGGGAPMADNNEGADGVGNASGNWHCDSTWLGDRVITTSTRTWALPTYNNHLYKQTSSASTGASNDNHYFGYSTPWGYFDFNRFHCHFSPRDWQRLINNNWGFRPKRLNFKLFNIQVKEVTTNDGVTTIANNLTSTVQVFSDSEYQLPYVLGSAHQGCLPPFPADVFMIPQYGYLTLNNGSQAVGRSSFYCLEYFPSQMLRTGNNFTFSYTFEEVPFHSSYAHSQSLDRLMNPLIDQYLYYLNRTQNQSGSAQNKDLLFSRGSPAGMSVQPKNWLPGPCYRQQRVSKTKTDYNNSNFTWTGASKYNLNGRESIINPGTAMASHKDDEDKFFPMSGVMIFGKESAGASNTALDNVMITDEEEIKATNPVATERFGTVAVNFQSSSTDPATGDVHVMGALPGMVWQDRDVYLQGPIWAKIPHTDGHFHPSPLMGGFGLKHPPPQILIKNTPVPANPPAEFSATKFASFITQYSTGQVSVEIEWELQKENSKRWNPEVQYTSNYAKSANVDFTVDNNGLYTEPRPIGTRYLTRPL

SEQ ID NO: 694 - DNA, 2208 bp, Artificial Sequence
  Description of Artificial Sequence: Synthetic polynucleotide
atggctgccgatggttatcctccagattggctcgaggacaacctctctgagggcattcgcgagtggtgggacttgaaacctggagtcccgaaacctaaagccaaccagcaaaagcaggacgacggccggggtctggtgcttcctggctacaagtacctcggacccttcaacggactcgacaagggggagcccgtcaacgcggcggacgcagcggccctcgagcacgacaaggcctacgaccagcagctcaaagcgggtgacaatccgtacctgcggtataaccacgccgacgccgagtttcaggagcgtctgcaagaagatacgtcttttgggggcaacctcgggcgagcagtcttccaggccaagaagcgggttctcgaaccttttggtctggttgaggaaggcgctaagacggctcctggaaagaaacgtccggtagagcagtcgccacaagagccagactcctcctcgggcatcggcaagacaggccagcagcccgctaaaaagagactcaattttggtcagactggcgactcagagtcagtccccgacccacaacctctcggagaacctccagcaacccccgctgctgtgggacctactacaatggcttcaggcggtggcgcaccaatggcagacaataacgaaggcgccgacggagtgggtaatgcctcaggaaattggcattgcgattccacatggctgggcgacagagtcatcaccaccagcacccgcacctgggccttgcccacctacaataaccacctctacaagcaaatctccagtgcttcaacgggggccagcaacgacaaccactacttcggctacagcaccccctgggggtattttgatttcaacagattccactgccacttttcaccacgtgactggcagcgactcatcaacaacaattggggattccggcccaagagactcaacttcaagctcttcaacatccaagtcaaggaggtcacgacgaacgatggcgtcacgaccatcgctaataaccttaccagcacggttcaagtcttctcggattcagagtaccaactgccgtacgtcctcggctctgcgcaccagggctgcctccctccgttcccggcggacgtgttcatgattccgcagtacggctacctaacgctcaacaatggcagccaggccgtgggacgttcatccttttactgcctggaatatttcccttctcagatgctgagaacgggcaacaactttaccttcagctacacctttgaggaagtgcctttccacagcagctacgcgcacagccagagcctggaccggctgatgaatcctctcatcgaccaatacctgtattacctgaacagaactcaaaatcagtccggaagtgcccaaaacaaggacttgctgtttagccgtgggtctccagctggcatgtctgttcagcccaaaaactggctacctggaccctgttatcggcagcagcgcgtttctaaaacaaaaacagacaacaacaacagcaattttacctggactggtgcttcaaaatataacctcaatgggcgtgaatccatcatcaaccctggcactgctatggcctcacacaaagacgacgaagacaagttctttcccatgagcggtgtcatgatttttggaaaagagagcgccggagcttcaaatactgcattggacaatgtcatgatcacagatgaagaggaaattaaagccactaaccctgtggccaccgaaagatttgggaccgtggcagtcaatttccagagcagcagcacagaccccgcgaccggagatgtgcatgttatgggagccttacctggcatggtgtggcaagacagagacgtatacctgcagggtcccatttgggccaaaattcctcacacggatggacactttcacccgtctcctctcatgggcggctttggacttaagcacccgcctcctcaaatcctcatcaaaaacacgcctgttcctgcgaatcctccggcagagttttcggctacaaagtttgcttcattcatcacccagtactccacaggacaagtgagtgtggaaattgaatgggagctgcagaaagaaaacagcaagcgctggaatcccgaagtgcagtacacatccaattatgcaaaatctgccaacgttgatttcactgtggacaacaatggactttatactgagcctcgccccattggcacccgttaccttacccgtcccttg

SEQ ID NO: 695 - protein, 736 aa, Artificial Sequence
  Description of Artificial Sequence: Synthetic polypeptide
MAADGYPPDWLEDNLSEGIREWWDLKPGVPKPKANQQKQDDGRGLVLPGYKYLGPFNGLDKGEPVNAADAAALEHDKAYDQQLKAGDNPYLRYNHADAEFQERLQEDTSFGGNLGRAVFQAKKRVLEPFGLVEEGAKTAPGKKRPVEQSPQEPDSSSGIGKTGQQPAKKRLNFGQTGDSESVPDPQPLGEPPATPAAVGPTTMASGGGAPMADNNEGADGVGNASGNWHCDSTWLGDRVITTSTRTWALPTYNNHLYKQISSASTGASNDNHYFGYSTPWGYFDFNRFHCHFSPRDWQRLINNNWGFRPKRLNFKLFNIQVKEVTTNDGVTTIANNLTSTVQVFSDSEYQLPYVLGSAHQGCLPPFPADVFMIPQYGYLTLNNGSQAVGRSSFYCLEYFPSQMLRTGNNFTFSYTFEEVPFHSSYAHSQSLDRLMNPLIDQYLYYLNRTQNQSGSAQNKDLLFSRGSPAGMSVQPKNWLPGPCYRQQRVSKTKTDNNNSNFTWTGASKYNLNGRESIINPGTAMASHKDDEDKFFPMSGVMIFGKESAGASNTALDNVMITDEEEIKATNPVATERFGTVAVNFQSSSTDPATGDVHVMGALPGMVWQDRDVYLQGPIWAKIPHTDGHFHPSPLMGGFGLKHPPPQILIKNTPVPANPPAEFSATKFASFITQYSTGQVSVEIEWELQKENSKRWNPEVQYTSNYAKSANVDFTVDNNGLYTEPRPIGTRYLTRPL

SEQ ID NO: 696 - DNA, 2196 bp, Artificial Sequence
  Description of Artificial Sequence: Synthetic polynucleotide
atggctgccgatggttatcttccagattggctcgaggacaacctctctgagggcattcgcgagtggtgggacttgaaacctggagccccgaaacctaaagccaaccagcaaaagcaggacgacggccggggtctggtgcttcctggctacaagtacctcggacccttcaacggactcgacaagggggagcccgtcaacgcggcggacgcagcggccctcgagcacgacaaggcctacgaccagcagctcaaagcgggtgacaatccgtacctgcggtataaccacgccgacgccgagtttcaggagcgtctgcaagaagatacgtcttttgggggcaacctcgggcgagcagtcttccaggccaagaagcgggttctcgaaccttttggtctggttgaggaaggcgctaagacggctcctggaaagaaacgtccggtagagcagtcgccacaagagccagactcctcctcgggcatcggcaagacaggccagcagcccgctaaaaagagactcaattttggtcagactggcgactcagagtcagtccccgacccacaacctctcggagaacctccagcaacccccgctgctgtgggacctactacaatggcttcaggcggtggcgcaccaatggcagacaataacgaaggcgccgacggagtgggtaatgcctcaggaaattggcattgcgattccacatggctgggcgacagagtcatcaccaccagcacccgcacctgggccttgcccacctacaataaccacctctacaagcaaatctccagtgcttcaacgggggccagcaacgacaaccactacttcggctacagcaccccctgggggtattttgatttcaacagattccactgccacttttcaccacgtgactggcagcgactcatcaacaacaattggggattccggcccaagagactcaacttcaagctcttcaacatccaagtcaaggaggtcacgacgaacgatggcgtcacgaccatcgctaataaccttaccagcacggttcaagccttctcggattcagagtaccaactgccgtacgtcctcggctctgcgcaccagggctgcctccctccgttcccggcggacgtgttcatgattccgcagtacggctacctaacgctcaacaatggcagccaggccgtgggacgttcatccttttactgcctggaatatttcccttctcagatgctgagaacgggcaacaactttaccttcagctacacctttgaggaagtgcctttccacagcagctacgcgcacagccagagcctggaccggctgatgaatcctctcatcgacccatacctgtattacctgaacagaactcaaaatcagtccggaagtgcccaaaacaaggacttgctgtttagccgtgggtctccagctggcatgtctgttcagcccaaaaactggctacctggaccctgttatcggcagcagcgcgtttctaaaacaaaaacagacaacaacaacagcaattttacctggactggtgcttcaaaatataacctcaatgggcgtgaatccatcatcaaccctggcactgctatggcctcacacaaagacgacgaagacaagttctttcccatgagcggtgtcatgatttttggaaaagagagcgccggagcttcaaatactgcattggacaatgtcatgatcacagatgaagaggaaattaaagccactaaccctgtggccaccgaaagatttgggaccgtggcagtcaatttccagagcagcagcacagaccccgcgaccggagatgtgcatgttatgggagccttacctggcatggtgtggcaagacagagacgtatacctgcagggtcccatttgggccaaaattcctcacacggatggacactttcacccgtctcctctcatgggcggctttggacttaagcacccgcctcctcaaatcctcatcaaaaacacgcctgttcctgcgaatcctccggcagagttttcggctacaaagtttgcttcattcatcacccagtactccacaggacaagtgagtgtggaaattgaatgggagctgcagaaagaaaacagcaagcgctggaatcccgaagtgcagtacacatccaattatgcaaaatctgccaacgttgatttcactgtggacaacaatggactttatactgagcctcgccccattggcacccgttacctt

SEQ ID NO: 697 - protein, 732 aa, Artificial Sequence
  Description of Artificial Sequence: Synthetic polypeptide
MAADGYLPDWLEDNLSEGIREWWDLKPGAPKPKANQQKQDDGRGLVLPGYKYLGPFNGLDKGEPVNAADAAALEHDKAYDQQLKAGDNPYLRYNHADAEFQERLQEDTSFGGNLGRAVFQAKKRVLEPFGLVEEGAKTAPGKKRPVEQSPQEPDSSSGIGKTGQQPAKKRLNFGQTGDSESVPDPQPLGEPPATPAAVGPTTMASGGGAPMADNNEGADGVGNASGNWHCDSTWLGDRVITTSTRTWALPTYNNHLYKQISSASTGASNDNHYFGYSTPWGYFDFNRFHCHFSPRDWQRLINNNWGFRPKRLNFKLFNIQVKEVTTNDGVTTIANNLTSTVQAFSDSEYQLPYVLGSAHQGCLPPFPADVFMIPQYGYLTLNNGSQAVGRSSFYCLEYFPSQMLRTGNNFTFSYTFEEVPFHSSYAHSQSLDRLMNPLIDPYLYYLNRTQNQSGSAQNKDLLFSRGSPAGMSVQPKNWLPGPCYRQQRVSKTKTDNNNSNFTWTGASKYNLNGRESIINPGTAMASHKDDEDKFFPMSGVMIFGKESAGASNTALDNVMITDEEEIKATNPVATERFGTVAVNFQSSSTDPATGDVHVMGALPGMVWQDRDVYLQGPIWAKIPHTDGHFHPSPLMGGFGLKHPPPQILIKNTPVPANPPAEFSATKFASFITQYSTGQVSVEIEWELQKENSKRWNPEVQYTSNYAKSANVDFTVDNNGLYTEPRPIGTRYL

SEQ ID NO: 698 - DNA, 2208 bp, Artificial Sequence
  Description of Artificial Sequence: Synthetic polynucleotide
atggctgccgatggttatcttccagattggctcgaggacaacctctctgagggcattcgcgagtggtgggacttgaaacctggagccccgaaacctaaagccaaccagcaaaagcaggacgacggccggggtctggtgcttcctggctacaagtacctcggacccttcaacggactcgacaagggggagcccgtcaacgcggcggacgcagcggccctcgagcacgacaaggcctacgaccagcagctcaaagcgggtgacaatccgtacctgcggtataaccacgccgacgccgagtttcaggagcgtctgcaagaagatacgtcttttgggggcaacctcgggcgagcagtcttccaggccaagaagcgggttctcgaaccttttggtctggttgaggaaggcgctaagacggctcctggaaagaaacgtccggtagagcagtcgccacaagagccagactcctcctcgggcatcggcaagacaggccagcagcccgctaaaaagagactcaattttggtcagactggcgactcagagtcagtccccgacccacaacctctcggagaacctccagcaacccccgctgctgtgggacctactacaatggcttcaggcggtggcgcaccaatggcagacaataacgaaggcgccgacggagtgggtaatgcctcaggaaattggcattgcgattccacatggctgggcgacagagtcatcaccaccagcacccgcacctgggccttgcccacctacaataaccacctctacaagcaaatctccagtgcttcaacgggggccagcaacgacaaccactacttcggctacagcaccccctgggggtattttgatttcaacagattccactgccacttttcaccacgtgactggcagcgactcatcaacaacaattggggattccggcccaagagactcaacttcaagctcttcaacatccaagtcaaggaggtcacgacgaacgatggcgtcacgaccatcgctaataaccttaccagcacggttcaagtcttctcggattcagagtaccaactgccgtacgtcctcggctctgcgcaccagggctgcctccctccgttcccggcggacgtgttcatgattccgcagtacggctacctaacgctcaacaatggcagccaggccgtgggacgttcatccttttactgcctggaatatttcccttctcagatgctgagaacgggcaacaactttaccttcagctacacctttgaggaagtgcctttccacagcagctacgcgcacagccagagcctggaccggctgatgaatcctctcatcgaccaatacctgtattacctgaacagaactcaaaatcagtccggaagtgcccaaaacaaggacttgctgtttagccgtgggtctccagctggcatgtctgttcagcccaaaaactggctacctggaccctgttatcggcagcagcgcgtttctaaaacaaaaacagacaacaacaacagcaattttacctggactggtgcttcaaaatataacctcaatgggcgtgaatccatcatcaaccctggcactgctatggcctcacacaaagacgacgaagacaagttctttcccatgagcggtgtcatgatttttggaaaagagagcgccggagcttcaaatactgcattggacaatgtcatgatcacagatgaagaggaaattaaagccactaaccctgtggccaccgaaagatttgggaccgtggcagtcaatttccagagcagcagcacagaccccgcgaccggagatgtgcatgttatgggagccttacctggcatggtgtggcaagacagagacgtatacctgcagggtcccatttgggccaaaattcctcacacggatggacactctcacccgtctcctctcatgggcggctttggacttaagcacccgcctcctcaaatcctcatcaaaaacacgcctgttcctgcgaatcctccggcagagttttcggctacaaagtttgcttcattcatcacccagtactccacaggacaagtgagtgtggaaattgaatgggagctgcagaaagaaaacagcaagcgctggaatcccgaagtgcagtacacatccaattatgcaaaatctgccaacgttgatttcactgtggacaacaatggactttatactgagcctcgccccattggcacccgttaccttacccgtcccttg

SEQ ID NO: 699 - protein, 736 aa, Artificial Sequence
  Description of Artificial Sequence: Synthetic polypeptide
MAADGYLPDWLEDNLSEGIREWWDLKPGAPKPKANQQKQDDGRGLVLPGYKYLGPFNGLDKGEPVNAADAAALEHDKAYDQQLKAGDNPYLRYNHADAEFQERLQEDTSFGGNLGRAVFQAKKRVLEPFGLVEEGAKTAPGKKRPVEQSPQEPDSSSGIGKTGQQPAKKRLNFGQTGDSESVPDPQPLGEPPATPAAVGPTTMASGGGAPMADNNEGADGVGNASGNWHCDSTWLGDRVITTSTRTWALPTYNNHLYKQISSASTGASNDNHYFGYSTPWGYFDFNRFHCHFSPRDWQRLINNNWGFRPKRLNFKLFNIQVKEVTTNDGVTTIANNLTSTVQVFSDSEYQLPYVLGSAHQGCLPPFPADVFMIPQYGYLTLNNGSQAVGRSSFYCLEYFPSQMLRTGNNFTFSYTFEEVPFHSSYAHSQSLDRLMNPLIDQYLYYLNRTQNQSGSAQNKDLLFSRGSPAGMSVQPKNWLPGPCYRQQRVSKTKTDNNNSNFTWTGASKYNLNGRESIINPGTAMASHKDDEDKFFPMSGVMIFGKESAGASNTALDNVMITDEEEIKATNPVATERFGTVAVNFQSSSTDPATGDVHVMGALPGMVWQDRDVYLQGPIWAKIPHTDGHSHPSPLMGGFGLKHPPPQILIKNTPVPANPPAEFSATKFASFITQYSTGQVSVEIEWELQKENSKRWNPEVQYTSNYAKSANVDFTVDNNGLYTEPRPIGTRYLTRPL

SEQ ID NO: 700 - DNA, 2208 bp, Artificial Sequence
  Description of Artificial Sequence: Synthetic polynucleotide
atggctgccgatggttatcttccagattggctcgaggacaacctctctgagggcattcgcgagtggtgggacttgaaacctggagccccgaaacctaaagccaaccagcaaaagcaggacgacggccggggtctggtgcttcctggctacaagtacctcggacccttcaacggactcgacaagggggagcccgtcaacgcggcggacgcagcggccctcgagcacgacaaggcctacgaccagcagctcaaagcgggtgacaatccgtacctgcggtataaccacgccgacgccgagtttcaggagcgtctgcaagaagatacgtcttttgggggcaacctcgggcgagcagtcttccaggccaagaagcgggttctcgaaccttttggtctggttgaggaaggcgctaagacggctcctggaaagaaacgtccggtagagcagtcgccacaagagccagactcctcctcgggcatcggcaagacaggccagcagcccgctaaaaagagactcaattttggtcagactggcgactcagagtcagtccccgacccacaacctctcggagaacctccagcaacccccgctgctgtgggacctactacaatggcttcaggcggtggcgcaccaatggcagacaataacgaaggcgccgacggagtgggtaatgcctcaggaaattggcattgcgattccacatggctgggcgacagagtcatcaccaccagcacccgcacctgggccttgcccacctacaataaccacctctacaagcaaatctccagtgcttcaacgggggccagcaacgacaaccactacttcggctacagcaccccctgggggtattttgatttcaacagattccactgccacttttcaccacgtgactggcagcgactcatcaacaacaattggggattccggcccaagagactcaacttcaagctcttcaacatccaagtcaaggaggtcacgacgaacgatggcgtcacgaccatcgctaataaccttaccagcacggttcaagtcttctcggattcagagtaccaactgccgtacgtcctcggctctgcgcaccagggctgcctccctccgttcccggcggacgtgttcatgattccgcagtacggctacctaacgctcaacaatggcagccaggccgtgggacgttcatccttttactgcctggaatatttcccttctcagatgctgagaacgggcaacaactttaccttcagctacacctttgaggaagtgcctttccacagcagctacgcgcacagccagagcctggaccggctgatgaatcctctcatcgacctatacctgtattacctgaacagaactcaaaatcagtccggaagtgcccaaaacaaggacttgctgtttagccgtgggtctccagctggcatgtctgttcagcccaaaaactggctacctggaccctgttatcggcagcagcgcgtttctaaaacaaaaacagacaacaacaacagcaattttacctggactggtgcttcaaaatataacctcaatgggcgtgaatccatcatcaaccctggcactgctatggcctcacacaaagacgacgaagacaagttctttcccatgagcggtgtcatgatttttggaaaagagagcgccggaacttcaaatactgcattggacaatgtcatgatcacagatgaagaggaaattaaagccactaaccctgtggccaccgaaagatttgggaccgtggcagtcaatttccagagcagcagcacagaccccgcgaccggagatgtgcatgttatgggagccttacctggcatggtgtggcaagacagagacgtatacctgcagggtcccatttgggccaaaattcctcacacggatggacactttcacccgtctcctctcatgggcggctttggacttaagcacccgcctcctcaaatcctcatcaaaaacacgcctgttcctgcgaatcctccggcagagttttcggctacaaagtttgcttcattcatcacccagtactccacaggacaagtgagtgtggaaattgaatgggagctgcagaaagaaaacagcaagcgctggaatcccgaagtgcagtacacatccaattatgcaaaatctgccaacgttgatttcactgtggacaacaatggactttatactgagcctcgccccattggcacccgttaccttacccgtcccttg

SEQ ID NO: 701 - protein, 736 aa, Artificial Sequence
  Description of Artificial Sequence: Synthetic polypeptide
MAADGYLPDWLEDNLSEGIREWWDLKPGAPKPKANQQKQDDGRGLVLPGYKYLGPFNGLDKGEPVNAADAAALEHDKAYDQQLKAGDNPYLRYNHADAEFQERLQEDTSFGGNLGRAVFQAKKRVLEPFGLVEEGAKTAPGKKRPVEQSPQEPDSSSGIGKTGQQPAKKRLNFGQTGDSESVPDPQPLGEPPATPAAVGPTTMASGGGAPMADNNEGADGVGNASGNWHCDSTWLGDRVITTSTRTWALPTYNNHLYKQISSASTGASNDNHYFGYSTPWGYFDFNRFHCHFSPRDWQRLINNNWGFRPKRLNFKLFNIQVKEVTTNDGVTTIANNLTSTVQVFSDSEYQLPYVLGSAHQGCLPPFPADVFMIPQYGYLTLNNGSQAVGRSSFYCLEYFPSQMLRTGNNFTFSYTFEEVPFHSSYAHSQSLDRLMNPLIDLYLYYLNRTQNQSGSAQNKDLLFSRGSPAGMSVQPKNWLPGPCYRQQRVSKTKTDNNNSNFTWTGASKYNLNGRESIINPGTAMASHKDDEDKFFPMSGVMIFGKESAGTSNTALDNVMITDEEEIKATNPVATERFGTVAVNFQSSSTDPATGDVHVMGALPGMVWQDRDVYLQGPIWAKIPHTDGHFHPSPLMGGFGLKHPPPQILIKNTPVPANPPAEFSATKFASFITQYSTGQVSVEIEWELQKENSKRWNPEVQYTSNYAKSANVDFTVDNNGLYTEPRPIGTRYLTRPL

SEQ ID NO: 702 - DNA, 2208 bp, Artificial Sequence
  Description of Artificial Sequence: Synthetic polynucleotide
atggctgccgatggttatcttccagattggctcgaggacagcctctctgagggcattcgcgagtggtgggacttgaaacctggagccccgaaacctaaagccaaccagcaaaagcaggacgacggccggggtctggtgcttcctggctacaagtacctcggacccttcaacggactcgacaagggggagcccgtcaacgcggcggacgcagcggccctcgagcacgacaaggcctacgaccagcagctcaaagcgggtgacaatccgtacctgcggtataaccacgccgacgccgagtttcaggagcgtctgcaagaagatacgtcttttgggggcaacctcgggcgagcagtcttccaggccaagaagcgggttctcgaaccttttggtctggttgaggaaggcgctaagacggctcctggaaagaaacgtccggtagagcagtcgccacaagagccagactcctcctcgggcatcggcaagacaggccagcagcccgctaaaaagagactcaattttggtcagactggcgactcagagtcagtccccgacccacaacctctcggagaacctccagcaacccccgctgctgtgggacctactacgatggcttcaggcggtggcgcaccaatggcagacaataacgaaggcgccgacggagtgggtaatgcctcaggaaattggcattgcgattccacatggctgggcgacagagtcatcaccaccagcacccgcacctgggccttgcccacctacaataaccacctctacaagcaaatctccagtgcttcaacgggggccagcaacgacaaccactacttcggctacagcaccccctgggggtattttgatttcaacagattccactgccacttttcaccacgtgactggcagcgactcatcaacaacaattggggattccggcccaagagactcaacttcaagctcttcaacatccaagtcaaggaggtcacgacgaacgatggcgtcacgaccatcgctaataaccttaccagcacggttcaagtcttctcggattcagagtaccaactgccgtacgtcctcggctctgcgcaccagggctgcctccctccgttcccggcggacgtgttcatgattccgcagtacggctacctaacgcccaacaatggcagccaggccgtgggacgttcatccttttactgcctggaatatttcccttctcagatgctgagaacgggcaacaactttaccttcagctacacctttgaggaagtgcctttccacagcagctacgcgcacagccagagcctggaccggctgatgaatcctctcatcgaccaataccagtattacctgaacagaactcaaaatcagtccggaagtgcccaaaacaaggacttgctgtttagccgtgggtctccagctggcatgtctgttcagcccaaaaactggctacctggaccctgttatcggcagcagcgcgtttctaaaacaaaaacagacaacaacaacagcaattttacctggactggtgcttcaaaatataacctcaatgggcgtgaatccatcatcaaccctggcactgctatggcctcacacaaagacgacgaagacaagttctttcccatgagcggtgtcatgatttttggaaaagagagcgccggagcttcaaatactgcattggacaatgtcatgatcacagatgaagaggaaattaaagccactaaccctgtggccaccgaaagatttgggaccgtggcagtcaatttccagagcagcagcacagaccccgcgaccggagatgtgcatgttatgggagccttacctggcatggtgtggcaagacagagacgtatacctgcagggtcccatttgggccaaaattcctcacacggatggacactttcacccgtctcctctcatgggcggctttggacttaagcacccgcctcctcaaatcctcatcaaaaacacgcctgttcctgcgaatcctccggcagagttttcggctacaaagtttgcttcattcatcacccagtactccacaggacaagtgagtgtggaaattgaatgggagctgcagaaagaaaacagcaagcgctggaatcccgaagtgcagtacacatccaattatgcaaaatctgccaacgttgatttcactgtggacaacaatggactttatactgagcctcgccccattggcacccgttaccttacccgtcccttg

SEQ ID NO: 703 - protein, 736 aa, Artificial Sequence
  Description of Artificial Sequence: Synthetic polypeptide
MAADGYLPDWLEDSLSEGIREWWDLKPGAPKPKANQQKQDDGRGLVLPGYKYLGPFNGLDKGEPVNAADAAALEHDKAYDQQLKAGDNPYLRYNHADAEFQERLQEDTSFGGNLGRAVFQAKKRVLEPFGLVEEGAKTAPGKKRPVEQSPQEPDSSSGIGKTGQQPAKKRLNFGQTGDSESVPDPQPLGEPPATPAAVGPTTMASGGGAPMADNNEGADGVGNASGNWHCDSTWLGDRVITTSTRTWALPTYNNHLYKQISSASTGASNDNHYFGYSTPWGYFDFNRFHCHFSPRDWQRLINNNWGFRPKRLNFKLFNIQVKEVTTNDGVTTIANNLTSTVQVFSDSEYQLPYVLGSAHQGCLPPFPADVFMIPQYGYLTPNNGSQAVGRSSFYCLEYFPSQMLRTGNNFTFSYTFEEVPFHSSYAHSQSLDRLMNPLIDQYQYYLNRTQNQSGSAQNKDLLFSRGSPAGMSVQPKNWLPGPCYRQQRVSKTKTDNNNSNFTWTGASKYNLNGRESIINPGTAMASHKDDEDKFFPMSGVMIFGKESAGASNTALDNVMITDEEEIKATNPVATERFGTVAVNFQSSSTDPATGDVHVMGALPGMVWQDRDVYLQGPIWAKIPHTDGHFHPSPLMGGFGLKHPPPQILIKNTPVPANPPAEFSATKFASFITQYSTGQVSVEIEWELQKENSKRWNPEVQYTSNYAKSANVDFTVDNNGLYTEPRPIGTRYLTRPL

SEQ ID NO: 704 - DNA, 2205 bp, Artificial Sequence
  Description of Artificial Sequence: Synthetic polynucleotide
atgactgacggttaccttccagattggctagaggacaacctctctgagggcgttcgagagtggtgggcgctgcaacctggagcccctaaacccaaggcaaatcaacaacatcaggacaacgctcggggtcttgtgcttccgggttacaaatacctcggacccggcaacggactcgacaagggggaacccgtcaacgcagcggacgcggcagccctcgagcacgacaaggcctacgaccagcagctcaaggccggtgacaacccctacctcaagtacaaccacgccgacgcggagttccagcagcggcttcagggcgacacatcgtttgggggcaacctcggcagagcagtcttccaggccaaaaagagggttcttgaacctcttggtctggttgagcaagcgggtgagacggctcctggaaagaagagaccgttgattgaatccccccagcagcccgactcctccacgggtatcggcaaaaaaggcaagcagccggctaaaaagaagctcgttttcgaagacgaaactggagcaggcgacggaccccctgagggatcaacttccggagccatgtctgatgacagtgagatgcgtgcagcaactggcggagctgcagtcgagggcggacaaggtgccgatggagtgggtaatgcctcgggtgattggcattgcgattccacctggtctgagggccacgtcacgaccaccagcaccagaacctgggtcttgcccacctacaacaaccacctctacaagcgactcggagagagcctgcagtccaacacctacaacggattctccaccccctggggatactttgacttcaaccgcttccactgccacttctcaccacgtgactggcagcgactcatcaacaacaactggggcatgcgacccaaagccatgcgggtcaaaatcttcaacatccaggtcaaggaggtcacgacgtcgaacggcgagacaacggtggctaataaccttaccagcacggttcagatctttgcggactcgtcgtacgaactgccgtacgtgatggatgcgggtcaagagggcagcctgcctccttttcccaacgacgtctttatggtgccccagtacggctactgtggactggtgaccggcaacacttcgcagcaacagactgacagaaatgccttctactgcctggagtactttccttcgcagatgctgcggactggcaacaactttgaaattacgtacagttttgagaaggtgcctttccactcgatgtacgcgcacagccagagcctggaccggctgatgaaccctctcatcgaccagtacctgtggggactgcaatcgaccaccaccggaaccaccctgaatgccgggactgccaccaccaactttaccaagctgcggcctaccaacctttccaactttaaaaagaactggctgcccgggccttcaatcaagcagcagggcttctcaaagactgccaatcaaaactacaagatccctgccaccgggtcagacagtctcatcaaatacgagacgcacagcactctggacggaagatggagtgccctgacccccggacctccaatggccacggctggacctgcggacagcaagttcagcaacagccagctcatctttgcggggcctaaacagaacggcaacacggccaccgtacccgggactctgatcttcacctctgaggaggagctggcagccaccaacgctaccgatacggacatgtggggcaacctacctggcggtgaccagagcaacagcaacctgccgaccgtggacagactgacagccttgggagccgtgcctggaatggtctggcaaaacagagacatttactaccagggtcccatttgggccaagattcctcataccgatggacactttcacccctcaccgctgattggtgggtttgggctgaaacacccgcctcctcaaatttttatcaagaacaccccggtacctgcgaatcctgcgacgaccttcagctctactccggtaaactccttcattactcagtacagcactggccaggtgtcggtgcagattgactgggagatccagaaggagcggtccaaacgctggaaccccgaggtccagtttacctccaactacggacagcaaaactctctgttgtgggctcccgatgcggctgggaaatacactgagcctagggctatcggtacccgctacctcacccaccacctgtaa

SEQ ID NO: 705 - protein, 734 aa, Artificial Sequence
  Description of Artificial Sequence: Synthetic polypeptide
MTDGYLPDWLEDNLSEGVREWWALQPGAPKPKANQQHQDNARGLVLPGYKYLGPGNGLDKGEPVNAADAAALEHDKAYDQQLKAGDNPYLKYNHADAEFQQRLQGDTSFGGNLGRAVFQAKKRVLEPLGLVEQAGETAPGKKRPLIESPQQPDSSTGIGKKGKQPAKKKLVFEDETGAGDGPPEGSTSGAMSDDSEMRAATGGAAVEGGQGADGVGNASGDWHCDSTWSEGHVTTTSTRTWVLPTYNNHLYKRLGESLQSNTYNGFSTPWGYFDFNRFHCHFSPRDWQRLINNNWGMRPKAMRVKIFNIQVKEVTTSNGETTVANNLTSTVQIFADSSYELPYVMDAGQEGSLPPFPNDVFMVPQYGYCGLVTGNTSQQQTDRNAFYCLEYFPSQMLRTGNNFEITYSFEKVPFHSMYAHSQSLDRLMNPLIDQYLWGLQSTTTGTTLNAGTATTNFTKLRPTNLSNFKKNWLPGPSIKQQGFSKTANQNYKIPATGSDSLIKYETHSTLDGRWSALTPGPPMATAGPADSKFSNSQLIFAGPKQNGNTATVPGTLIFTSEEELAATNATDTDMWGNLPGGDQSNSNLPTVDRLTALGAVPGMVWQNRDIYYQGPIWAKIPHTDGHFHPSPLIGGFGLKHPPPQIFIKNTPVPANPATTFSSTPVNSFITQYSTGQVSVQIDWEIQKERSKRWNPEVQFTSNYGQQNSLLWAPDAAGKYTEPRAIGTRYLTHHL

SEQ ID NO: 706 - DNA, 2205 bp, Artificial Sequence
  Description of Artificial Sequence: Synthetic polynucleotide
atgactgacggttaccttccagattggctagaggacaacctctctgaaggcgttcgagagtggtgggcgctgcaacctggagcccctaaacccaaggcaaatcaacaacatcaggacaacgctcggggtcttgtgcttccgggttacaaatacctcggacccggcaacggactcgacaagggggaacccgtcaacgcagcggacgcggcagccctcgagcacgacaaggcctacgaccagcagctcaaggccggtgacaacccctacctcaagtacaaccacgccgacgcggagttccagcagcggcttcagggcgacacatcgtttgggggcaacctcggcagagcagtcttccaggccaaaaagagggttcttgaacctcttggtctggttgagcaagcgggtgagacggctcctggaaagaagagaccgttgattgaatccccccagcagcccgactcctccacgggtatcggcaaaaaaggcaagcagccggctaaaaagaagctcgttttcgaagacgaaactggagcaggcgacggaccccctgagggatcaacttccggagccatgtctgatgacagtgagatgcgtgcagcagctggcggagctgcagtcgagggcggacaaggtgccgatggagtgggtaatgcctcgggtgattggcattgcgattccacctggtctgagggccacgtcacgaccaccagcaccagaacctgggtcttgcccacctacaacaaccacctctacaagcgactcggagagagcctgcagtccaacacctacaacggattctccaccccctggggatactttgacttcaaccgcttccactgccacttcttaccacgtgactggcagcgactcatcaacaacaactggggcgtgcgacccaaagccatgcgggtcaaaatcttcaacatccaggtcaaggaggtcacgacgtcgaacggcgagacaacggtggctaataaccttaccagcacggttcagatctttgcggactcgtcgtacgaactgccgtacgtgatggatgcgggtcaagagggcagcctgcctccttttcccaacgacgtctttatggtgccccagtacggctactgtggactggtgaccggcgacacttcgcagcaacagactgacagaaatgccttctactgcctggagtactttccttcgcagatgctgcggactggcaacaactttgaaattacgtacagttttgagaaggtgcctttccactcgatgtacgcgcacagccagagcctggaccggctgatgaaccctctcatcgaccagtacctgtggggactgcaatcgaccaccaccggaaccaccctgaatgccgggactgccaccaccaactttaccaagctgcggcctaccaacttttccaactttaaaaagaactggctgcccgggccttcaatcaagcagcagggcttctcaaagactgccaatcaaaactacaagatccctgccaccgggtcagacagtctcatcaaatacgagacgcacagcactctggacggaagatggagtgccctgacccccggacctccaatggccacggctggacctgcggacagcaagttcagcaacagccagctcatctttgcggggcctaaacagaacggcaacacggccaccgtacccgggactctgatcttcacctctgaggaggagctggcagccaccaacgccaccgatacggacatgtggggcaacctacctggcggtgaccagagcaacagcaacctgccgaccgtggacagactgacagccttgggagccgtgcctggaatggtctggcaaaacagagacatttactaccagggtcccatttgggccaagattcctcataccgatggacactttcacccctcaccgctgattggtgggtttgggctgaaacacccgcctcctcaaatttttatcaagaacaccccggtacctgcgaatcctgcgacgaccttcagctctactccggtaaactccttcattactcagtacagcactggccaggtgtcggtgcagattgactgggagatccagaaggagcggtccaaacgctggaaccccgaggtccagtttacctccaactacggacagcaaaactctctgttgtgggctcccgatgcggctgggaaatacactgagcctagggctatcggtacccgctacctcacccaccacctgtaa

SEQ ID NO: 707 - protein, 734 aa, Artificial Sequence
  Description of Artificial Sequence: Synthetic polypeptide
MTDGYLPDWLEDNLSEGVREWWALQPGAPKPKANQQHQDNARGLVLPGYKYLGPGNGLDKGEPVNAADAAALEHDKAYDQQLKAGDNPYLKYNHADAEFQQRLQGDTSFGGNLGRAVFQAKKRVLEPLGLVEQAGETAPGKKRPLIESPQQPDSSTGIGKKGKQPAKKKLVFEDETGAGDGPPEGSTSGAMSDDSEMRAAAGGAAVEGGQGADGVGNASGDWHCDSTWSEGHVTTTSTRTWVLPTYNNHLYKRLGESLQSNTYNGFSTPWGYFDFNRFHCHFLPRDWQRLINNNWGVRPKAMRVKIFNIQVKEVTTSNGETTVANNLTSTVQIFADSSYELPYVMDAGQEGSLPPFPNDVFMVPQYGYCGLVTGDTSQQQTDRNAFYCLEYFPSQMLRTGNNFEITYSFEKVPFHSMYAHSQSLDRLMNPLIDQYLWGLQSTTTGTTLNAGTATTNFTKLRPTNFSNFKKNWLPGPSIKQQGFSKTANQNYKIPATGSDSLIKYETHSTLDGRWSALTPGPPMATAGPADSKFSNSQLIFAGPKQNGNTATVPGTLIFTSEEELAATNATDTDMWGNLPGGDQSNSNLPTVDRLTALGAVPGMVWQNRDIYYQGPIWAKIPHTDGHFHPSPLIGGFGLKHPPPQIFIKNTPVPANPATTFSSTPVNSFITQYSTGQVSVQIDWEIQKERSKRWNPEVQFTSNYGQQNSLLWAPDAAGKYTEPRAIGTRYLTHHL

SEQ ID NO: 708 - DNA, 2205 bp, Artificial Sequence
  Description of Artificial Sequence: Synthetic polynucleotide
atgactgacggttaccttccagattggctagaggacaacctctctgaaggcgttcgagagtggtgggcgctgcaacctggagcccctaaacccaaggcaaatcaacaacatcaggacaacgctcggggtcttgtgcttccgggttacaaatacctcggacccggcaacggactcgacgagggggaacccgtcaacgcagcggacgcggcagccctcgagcacgacaaggcctacgaccagcagctcaaggccggtgacaacccctacctcaagtacaaccacgccgacgcggagttccagcagcggcttcagggcgacacatcgtttgggggcaacctcggcagagcagtcttccaggccaaaaagagggttcttgaacctcttggtctggttgagcaagcgggtgagacggctcctggaaagaagagaccgttgattgaatccccccagcagcccgactcctccacgggtatcggcaaaaaaggcaagcagccggctaaaaagaagctcgttttcgaagacgaaactggagcaggcgacggaccccctgagggatcaacttccggagccatgtctgatgacagtgagatgcgtgcagcagctggcggagctgcagtcgagggcggacaaggtgccgatggagtgggtaatgcctcgggtgattggcattgcgattccacctggtctgagggccacgtcacgaccaccagcaccagaacctgggtcttgcccacctacaacaaccacctctacaagcgactcggagagagcctgcagtccaacacctacaacggattctccaccccctggggatactttgacttcaaccgcttccactgccacttctcaccacgtgactggcagcgactcatcaacaacaactggggcatgcgacccaaagccatgcgggtcaaaatcttcaacatccaggtcaaggaggtcacgacgtcgaacggcgagacaacggtggctaataaccttaccagcacggttcagatctttgcggactcgtcgtacgaactgccgtacgtgatggatgcgggtcaagagggcagcctgcctccttttcccaacgacgtctttatggtgccccagtacggctactgtggactggtgaccggcaacacttcgcagcaacagactgacagaaatgccttctactgcctggagtactttccttcgcagatgctgcggactggcaacaactttgaaattacgtacagttttgagaaggtgcctttccactcgatgtacgcgcacagccagagcctggaccggctgatgaaccctctcatcgaccagtacctgtggggactgcaatcgaccaccaccggaaccaccctgaatgccgggactgccaccaccaactttaccaagctgcggcctaccaacttttccaactttaaaaagaactggctgcccgggccttcaatcaagcagcagggcttctcaaagactgccaatcaaaactacaagatccctgccaccgggtcagacagtctcatcaaatacgagacgcacagcactctggacggaagatggagtgccctgacccccggacctccaatggccacggctggacctgcggacagcaagttcagcaacagccagctcatctttgcggggcctaaacagaacggcaacacggccaccgtacccgggactctgatcttcacctctgaggaggagctggcagccaccaacgctaccgatacggacatgtggggcaacctacctggcggtgaccagagcaacagcaacctgccgaccgtggacagactgacagccttgggagccgtgcctggaatggtctggcaaaacagagacatttactaccagggtcccatttgggccaagattcctcataccgatggacactttcacccctcaccgctgattggtgggtttgggctgaaacacccgcctcctcaaatttttatcaagaacaccccggtacctgcgaatcctgcgacgaccttcagctctactccggtaaactccttcattactcagtacagcactggccaggtgtcggtgcagattgactgggagatccagaaggagcggtccaaacgctggaaccccgaggtccagtttacctccaactacggacagcaaaactctctgttgtgggctcccgatgcggctgggaaatacactgagcctagggctatcggtacccgctacctcacccaccacctgtaa

SEQ ID NO: 709 - protein, 734 aa, Artificial Sequence
  Description of Artificial Sequence: Synthetic polypeptide
MTDGYLPDWLEDNLSEGVREWWALQPGAPKPKANQQHQDNARGLVLPGYKYLGPGNGLDEGEPVNAADAAALEHDKAYDQQLKAGDNPYLKYNHADAEFQQRLQGDTSFGGNLGRAVFQAKKRVLEPLGLVEQAGETAPGKKRPLIESPQQPDSSTGIGKKGKQPAKKKLVFEDETGAGDGPPEGSTSGAMSDDSEMRAAAGGAAVEGGQGADGVGNASGDWHCDSTWSEGHVTTTSTRTWVLPTYNNHLYKRLGESLQSNTYNGFSTPWGYFDFNRFHCHFSPRDWQRLINNNWGMRPKAMRVKIFNIQVKEVTTSNGETTVANNLTSTVQIFADSSYELPYVMDAGQEGSLPPFPNDVFMVPQYGYCGLVTGNTSQQQTDRNAFYCLEYFPSQMLRTGNNFEITYSFEKVPFHSMYAHSQSLDRLMNPLIDQYLWGLQSTTTGTTLNAGTATTNFTKLRPTNFSNFKKNWLPGPSIKQQGFSKTANQNYKIPATGSDSLIKYETHSTLDGRWSALTPGPPMATAGPADSKFSNSQLIFAGPKQNGNTATVPGTLIFTSEEELAATNATDTDMWGNLPGGDQSNSNLPTVDRLTALGAVPGMVWQNRDIYYQGPIWAKIPHTDGHFHPSPLIGGFGLKHPPPQIFIKNTPVPANPATTFSSTPVNSFITQYSTGQVSVQIDWEIQKERSKRWNPEVQFTSNYGQQNSLLWAPDAAGKYTEPRAIGTRYLTHHL

SEQ ID NO: 710 - DNA, 2208 bp, Artificial Sequence
  Description of Artificial Sequence: Synthetic polynucleotide
atggctgccgatggttatcttccagattggctcgaggacaaccttagtgaaggaattcgcgagtggtgggctttgaaacctggagcccctcaacccaaggcaaatcaacaacatcaagacaacgctcgaggtcttgtgcttccgggttacaaataccttggacccggcaacggactcgacaagggggagccggtcaacgcagcagacgcggcggccctcgtgcacgacaaggcctacgaccagcagctcaaggccggagacaacccgtacctcaagtgcaaccacgccgacgccgagttccaggagcggctcaaagaagatacgtcttttgggggcaacctcgggcgagcagtcttccaggccaaaaagaggcttcttgaacctcttggtctggttgaggaagcggctaagacggctcctggaaagaagaggcctgtagagcagtctcctcaggaaccggactcctccgcgggtattggcaaatcgggtgcacagcccgctaaaaagagactcaatttcggtcagactggcgacacagagtcagtcccagaccctcaaccaatcggagaacctcccgcagccccctcaggtgtgggatctcttacaatggcttcaggtggtggcgcaccagtggcagacaataacgaaggtgccgatggagtgggtagttcctcgggaaattggcattgcgattcccaatggctgggggacagagtcatcaccaccagcacccgaacctgggccctgcccacctacaacaatcacctctacaagcaaatctccaacagcacatctggaggatcttcaaatgacaacgcctacctcggctacagcaccccctgggggtattttgacttcaacagattccactgccacttctcaccacgtgactggcagcgactcatcaacaacaactggggattccggcctaagcgactcaacttcaagctcttcaacattcaggtcaaagaggttacggacaacaatggagtcaagaccatcgccaataaccttaccagcacggtccaggtcttcacggactcagactatcagctcccgtacgtgctcgggtcggctcacgagggctgcctcccgccgttcccagcggacgttttcacgattcctcagtacgggtatctgacgcttaatgatggaagccaggccgtgggtcgttcgtccttttactgcctggaatatttcccgtcgcaaatgctaagaacgggtaacaacttccagttcagctacgagtttgagaacgtacctttccatagcagctacgctcacagccaaagcctggaccgactaatgaatccactcatcgaccaatacttgtactatctctcaaagactattaacggttctggacagaatcaacaaacgctaaaattcagtgtggccggacccagcaacatggctgtccagggaagaaactacatacctggacccagctaccgacaacaacgtgtctcaaccactgtgactcaaaacaacaacagcgaatttgcttggcctggagcttcttcttgggctctcaatggacgtaatagcttgatgaatcctggacctgctatggccagccacaaagaaggagaggaccgtttctttcctttgtctggatctttaatttttggcaaacaaggaactggaagagacaacgtggatgcggacaaagtcatgataaccaacgaagaagaaattaaaactactaacccggtagcaacggagtcctatggacaagtggccacaaaccaccagagtgcccaagcacaggcgcagaccggctgggttcaaaaccaaggaatacttccgggtatggtttggcaggacagagatgtgtacctgcaaggacccatttgggccaaaattcctcacacggacggcaactttcacccttctccgctgatgggagggtttggaatgaagcacccgcctcctcagatcctcatcaaaaacacacctgtacctgcggatcctccaacggccttcaacaaggacaagctgaactctttcatcacccagtattctactggccaagtcagcgtggagatcgagtgggagctgcagaaggaaaacagcaagcgctggaacccggagatccagtacacttccaactattacaagtctaataatgttgaatttgctgttaatactgaaggtgtatatagtgaaccccgccccattgggccccgatacctgactcgtaatttt

SEQ ID NO: 711 - protein, 736 aa, Artificial Sequence
  Description of Artificial Sequence: Synthetic polypeptide
MAADGYLPDWLEDNLSEGIREWWALKPGAPQPKANQQHQDNARGLVLPGYKYLGPGNGLDKGEPVNAADAAALVHDKAYDQQLKAGDNPYLKCNHADAEFQERLKEDTSFGGNLGRAVFQAKKRLLEPLGLVEEAAKTAPGKKRPVEQSPQEPDSSAGIGKSGAQPAKKRLNFGQTGDTESVPDPQPIGEPPAAPSGVGSLTMASGGGAPVADNNEGADGVGSSSGNWHCDSQWLGDRVITTSTRTWALPTYNNHLYKQISNSTSGGSSNDNAYLGYSTPWGYFDFNRFHCHFSPRDWQRLINNNWGFRPKRLNFKLFNIQVKEVTDNNGVKTIANNLTSTVQVFTDSDYQLPYVLGSAHEGCLPPFPADVFTIPQYGYLTLNDGSQAVGRSSFYCLEYFPSQMLRTGNNFQFSYEFENVPFHSSYAHSQSLDRLMNPLIDQYLYYLSKTINGSGQNQQTLKFSVAGPSNMAVQGRNYIPGPSYRQQRVSTTVTQNNNSEFAWPGASSWALNGRNSLMNPGPAMASHKEGEDRFFPLSGSLIFGKQGTGRDNVDADKVMITNEEEIKTTNPVATESYGQVATNHQSAQAQAQTGWVQNQGILPGMVWQDRDVYLQGPIWAKIPHTDGNFHPSPLMGGFGMKHPPPQILIKNTPVPADPPTAFNKDKLNSFITQYSTGQVSVEIEWELQKENSKRWNPEIQYTSNYYKSNNVEFAVNTEGVYSEPRPIGPRYLTRNF

SEQ ID NO: 712 - DNA, 2208 bp, Artificial Sequence
  Description of Artificial Sequence: Synthetic polynucleotide
atggctgccgatggttatcttccagattggctcgaggacaaccttagtgaaggaattcgcgagtggtgggctttgaaacctggagcccctcaacccaaggcaaatcaacaacatcaagacaacgctcgaggtcttgtgcttccgggttacaaataccttggacccggcaacggactcgacaagggggagccggtcaacgcagcagacgcggcggccctcgagcacaacaaggcctacgaccagcagctcaaggccggagacaacccgtacctcaagtgcaaccacgccgacgccgagttccaggagcggctcaaagaagatacgtcttttgggggcaacctcgggcgagcagtcttccaggccaaaaagaggcttcttgaacctcttggtctggttgaggaagcggctaagacggctcctggaaagaagaggcctgtagagcagtctcctcaggaaccggactcctccgcgggtattggcaaatcgggtgcacagcccgctaaaaagagactcaatttcggtcagactggcgacacagagtcagtcccagaccctcaaccaatcggagaacctcccgcagccccctcaggtgtgagatctcttacaatggcttcaggtggtggcgcaccagtggcagacaataacgaaggtgccgatggagtgggtagttcctcgggaaattggcattgcgattcccaatggctgggggacagagtcatcaccaccagcacccgaacctgggccctgcccacctacaacaatcacctctacaagcaaatctccaacagcacatctggaggatcttcaaatgacaacgcctacctcggctacagcaccccctgggggtattttgacttcaacagattccactgccacttctcaccacgtgactggcagcgactcatcaacaacaactggggattccggcctaagcgactcaacttcaagctcttcaacattcaggtcaaagaggttacggacaacaatggagtcaagaccatcgccaataaccttaccagcacggtccaggtcttcacggactcagactatcagctcccgtacgtgctcgggtcggctcacgagggctgcctcccgccgttcccagcggacgttttcatgattcctcagtacgggtatctgacgcttaatgatggaagccaggccgtgggtcgttcgtccttttactgcctggaatatttcccgtcgcaaatgctaagaacgggtaacaacttccagttcagctacgagtttgagaacgtacctttccatagcagctacgctcacagccaaagcctggaccgactaatgaatccactcatcgaccaatacttgtactatctctcaaagactattaacggttctggacagaatcaacaaacgctaaaattcagtgtggccggacccagcaacatggctgtccagggaagaaactacatacctggacccagctaccgacaacaacgtgtctcaaccactgtgactcaaaacaacaacagcgaatttgcttggcctggagcttcttcttgggctctcaatggacgtaatagcttgatgaatcctggacctgctatggccagccacaaagaaggagaggaccgtttctttcctttgtctggatctttaatttttggcaaacaaggaactggaagagacaacgtggatgcggacaaagtcatgataaccaacgaagaagaaattaaaactactaacccggtagcaacggagtcctatggacaagtggccacaaaccaccagagtgcccaagcacaggcgcagaccggctgggttcaaaaccaaggaatacttccgggtatggtttggcaggacagagatgtgtacctgcaaggacccatttgggccaaaattcctcacacggacggcaactttcacccttctccgctgatgggagggtttggaatgaagcacccgcctcctcagatcctcatcaaaaacacacctgtacctgcggatcctccaacggccttcaacaaggacaagctgaactctttcatcacccagtattctactggccaagtcagcgtggagatcgagtgggagctgcagaaggaaaacagcaagcgctggaacccggagatccagtacacttccaactattacaagtctaataatgttgaatttgctgttaatactgaaggtgtatatagtgaaccccgccccattggcaccagatacctgactcgtaatctg

SEQ ID NO: 713 - protein, 736 aa, Artificial Sequence
  Description of Artificial Sequence: Synthetic polypeptide
MAADGYLPDWLEDNLSEGIREWWALKPGAPQPKANQQHQDNARGLVLPGYKYLGPGNGLDKGEPVNAADAAALEHNKAYDQQLKAGDNPYLKCNHADAEFQERLKEDTSFGGNLGRAVFQAKKRLLEPLGLVEEAAKTAPGKKRPVEQSPQEPDSSAGIGKSGAQPAKKRLNFGQTGDTESVPDPQPIGEPPAAPSGVRSLTMASGGGAPVADNNEGADGVGSSSGNWHCDSQWLGDRVITTSTRTWALPTYNNHLYKQISNSTSGGSSNDNAYLGYSTPWGYFDFNRFHCHFSPRDWQRLINNNWGFRPKRLNFKLFNIQVKEVTDNNGVKTIANNLTSTVQVFTDSDYQLPYVLGSAHEGCLPPFPADVFMIPQYGYLTLNDGSQAVGRSSFYCLEYFPSQMLRTGNNFQFSYEFENVPFHSSYAHSQSLDRLMNPLIDQYLYYLSKTINGSGQNQQTLKFSVAGPSNMAVQGRNYIPGPSYRQQRVSTTVTQNNNSEFAWPGASSWALNGRNSLMNPGPAMASHKEGEDRFFPLSGSLIFGKQGTGRDNVDADKVMITNEEEIKTTNPVATESYGQVATNHQSAQAQAQTGWVQNQGILPGMVWQDRDVYLQGPIWAKIPHTDGNFHPSPLMGGFGMKHPPPQILIKNTPVPADPPTAFNKDKLNSFITQYSTGQVSVEIEWELQKENSKRWNPEIQYTSNYYKSNNVEFAVNTEGVYSEPRPIGTRYLTRNL

SEQ ID NO: 714 - DNA, 2208 bp, Artificial Sequence
  Description of Artificial Sequence: Synthetic polynucleotide
atggctgccgatggttatcttccagattggctcgaggacaaccttagtgaaggaattcgcgagtggtgggctttgaaacctggagcccctcaacccaaggcaaatcaacaacatcaagacaacgctcgaggtcttgtgcttccgggttacaaataccttggacccggcaacggactcgacaagggggagccggtcaacgcagcagacgcggcggccctcgagcacgacaaggcctacgaccagcagctcaaggccggagacaacccgtacctcaagtgcaaccacgccgacgccgagttccaggagcggctcaaagaagatacgtcttttgggggcaacctcgggcgagcagtcttccaggccaaaaagaggcttcttgaacctcttggtctggttgaggaagcggctaagacggctcctggaaagaagaggcctgtagagcagtctcctcaggaaccggactcctccgcgggtattggcaaatcgggtgcacagcccgctaaaaagagactcaatttcggtcagactggcgacacagagtcagtcccagaccctcaaccaatcggagaacctcccgcagccccctcaggtgtgggatctcttacaatggcttcaggcggtggcgcaccagtggcagacaataacgaaggtgccgatggagtgggtagttcctcgggaaattggcattgcgattcccaatggctgggggacagagtcatcaccaccagcacccgaacctgggccctgcccacctacaacaatcacctctacaagcaaatctccaacagcacatctggaggatcttcaaatgacaacgcctacctcggctacagcaccccctgggggtattttgacttcaacagattccactgccacttctcaccacgtgactggcagcgactcatcaacaacaactggggattccggcctaagcgactcaacttcgagctcttcaacattcaggtcaaagaggttacggacaacaatggagtcaagaccatcgccaataaccttaccagcacggtccaggtcttcacggactcagactatcagctcccgtacgtgctcgggtcggctcacgagggctgcctcccgccgttcccagcggacgttttcatgattcctcagtacgggtatctgacgcttaatgatggaagccaggccgtgggtcgttcgtccttttactgcctggaatatttcccgtcgcaaatgctaagaacgggtaacaacttccagtccagctacgagtttgagaacgtacctttccatagcagctacgctcacagccaaagcctggaccgactaatgaatccactcatcgaccaatacttgtactatctctcaaagactattaacggttctggacagaatcaacaaacgctaaaattcagtgtggccggacccagcaacatggctgtccagggaagaaactacatacctggacccagctaccgacaacaacgtgcctcaaccactgtgactcaaaacaacaacagcgaatttgcttggcctggagcttcttcttgggctctcaatggacgtaatagcttgatgaatcctggacctgctatggccagccacaaagaaggggaggaccgtttctttcctttgtctggatctttaatttttggcaaacaaggaactggaagagacaacgtggatgcggacaaagtcatgataaccaacgaagaagaaattaaaactactaacccggtagcaacggagtcctatggacaagtggccacaaaccaccagagtgcccaagcacaggcgcagaccggctgggttcaaaaccaaggaatacttccgggtatggtttggcaggacagagatgtgtacctgcaaggacccatttgggccaaaattcctcacacggacggcaactttcacccttctccgctgatgggagggtttggaatgaagcacccgcctcctcagatcctcatcaaaaacacacctgtacctgcggatcctccaacggccttcaacaaggacaagctgaactctttcatcacccagtattctactggccaagtcagcgtggagatcgagtgggagctgcagaaggaaaacagcaagcgctggaacccggagatccagtacacttccaactattacaagtctaataatgttgaatttgctgttaatactgaaggtgtatatagtgaaccccgccccattggcaccagatacctgactcgtaatctg

SEQ ID NO: 715 - protein, 736 aa, Artificial Sequence
  Description of Artificial Sequence: Synthetic polypeptide
MAADGYLPDWLEDNLSEGIREWWALKPGAPQPKANQQHQDNARGLVLPGYKYLGPGNGLDKGEPVNAADAAALEHDKAYDQQLKAGDNPYLKCNHADAEFQERLKEDTSFGGNLGRAVFQAKKRLLEPLGLVEEAAKTAPGKKRPVEQSPQEPDSSAGIGKSGAQPAKKRLNFGQTGDTESVPDPQPIGEPPAAPSGVGSLTMASGGGAPVADNNEGADGVGSSSGNWHCDSQWLGDRVITTSTRTWALPTYNNHLYKQISNSTSGGSSNDNAYLGYSTPWGYFDFNRFHCHFSPRDWQRLINNNWGFRPKRLNFELFNIQVKEVTDNNGVKTIANNLTSTVQVFTDSDYQLPYVLGSAHEGCLPPFPADVFMIPQYGYLTLNDGSQAVGRSSFYCLEYFPSQMLRTGNNFQSSYEFENVPFHSSYAHSQSLDRLMNPLIDQYLYYLSKTINGSGQNQQTLKFSVAGPSNMAVQGRNYIPGPSYRQQRASTTVTQNNNSEFAWPGASSWALNGRNSLMNPGPAMASHKEGEDRFFPLSGSLIFGKQGTGRDNVDADKVMITNEEEIKTTNPVATESYGQVATNHQSAQAQAQTGWVQNQGILPGMVWQDRDVYLQGPIWAKIPHTDGNFHPSPLMGGFGMKHPPPQILIKNTPVPADPPTAFNKDKLNSFITQYSTGQVSVEIEWELQKENSKRWNPEIQYTSNYYKSNNVEFAVNTEGVYSEPRPIGTRYLTRNL

SEQ ID NO: 716 - DNA, 2208 bp, Artificial Sequence
  Description of Artificial Sequence: Synthetic polynucleotide
atggctgccgatggttatcttccagattggctcgaggacaaccttagtgaaggaattcgcgagtggtgggctttgaaacctggagcccctcaacccaaggcaaatcaacaacatcaagacaacgctcgaggtcttgtgcttccgggttacaaataccttggacccggcaacggactcgacaagggggagccggtcaacgcagcagacgcggcggccctcgagcacgacaaggcctacgaccagcagctcaaggccggagacaacccgtacctcaagtgcaaccacgccgacgccgagttccaggagcggctcaaagaagatacgtcttttgggggcaacctcgggcgagcagtcttccaggccaaaaagaggcttcttgaacctcttggtctggttgaggaagcggctaagacggctcctggaaagaagaggcctgtagagcagtctcctcaggaaccggactcctccgcgggtattggcaaatcgggtgcacagcccgctaaaaagagactcaatttcggtcagactggcgacacagagtcagtcccagaccctcaaccaatcggagaacctcccgcagcccccccaggtgtgggatctcttacaatggcttcaggtggtggcgcaccagtggcggacaataacgaaggtgccgatggagtgggtagttcctcgggaaattggcattgcgattcccaatggctgggggacagagtcatcaccaccagcacccgaacctgggccctgcccacctacaacaatcacctctacaagcaaatctccaacagcacatctggaggatcttcaaatgacaacgcctacctcggctacagcaccccctgggggtattttgacttcaacagattccactgccacttctcaccacgtgactggcagcgactcatcaacaacaactggggattccggcctaagcgactcaacttcaagctcttcaacattcaggtcaaagaggttacggacaacaatggagtcaagaccatcgccaataaccttaccagcacggtccaggtcttcacggactcagactatcagctcccgtacgtgctcgggtcggctcacgagggctgcctcccgccgttcccagcggacgttttcatgattcctcagtacgggtatctgacgcttaatgatggaagccaggccgtgggtcgttcgtccttttactgcctggaatatttcccgtcgcaaatgctaagaacgggtaacaacttccagttcagctacgagtttgagaacgtacctttccatagcagctacgctcacagccaaagcctggaccgactaatgaatccactcatcgaccaatacttgtactatctctcaaagactattagcggttctggacagaatcaacaaacgctaaaattcagtgtggccggacccagcaacatggctgtccagggaagaaactacatacctggacccagctaccgacaacaacgtgtctcaaccactgtgactcaaaacaacagcagcgaatttgcttggcctggagcttcttcttgggctctcaatggacgtaatagcttgatgaatcctggacctgctatggccagccacaaagaaggagaggaccgtttctttcctttgtctggatctttaatttttggcaaacaaggaactggaagagacaacgtggatgcggacaaagtcatgataaccaacgaagaagaaattaaaactactaacccggtagcaacggagtcctatggacaagtggccacaaaccaccagagtgcccaagcacaggcgcagaccggctgggttcaaaaccaaggaatactttcgggtatggtttggcaggacagagatgtgtacctgcaaggacccatttgggccaaaattcctcacacggacggcaactttcacccttctccgctgatgggagggtttggaatgaagcacccgcctcctcagatcctcatcaaaaacacacctgtacctgcggatcctccaacggccttcaacaaggacaagctgaactctttcatcacccagtattctactggccaagtcagcgtggagatcgagtgggagctgcagaaggaaaacagcaagcgctggaacccggagatccagtacacttccaactattacaagtctaataatgttgaatttgctgttaatactgaaggtgtatatagtgaaccccgccccattggcaccagatacctgactcgtaatctg

SEQ ID NO: 717 - protein, 736 aa, Artificial Sequence
  Description of Artificial Sequence: Synthetic polypeptide
MAADGYLPDWLEDNLSEGIREWWALKPGAPQPKANQQHQDNARGLVLPGYKYLGPGNGLDKGEPVNAADAAALEHDKAYDQQLKAGDNPYLKCNHADAEFQERLKEDTSFGGNLGRAVFQAKKRLLEPLGLVEEAAKTAPGKKRPVEQSPQEPDSSAGIGKSGAQPAKKRLNFGQTGDTESVPDPQPIGEPPAAPPGVGSLTMASGGGAPVADNNEGADGVGSSSGNWHCDSQWLGDRVITTSTRTWALPTYNNHLYKQISNSTSGGSSNDNAYLGYSTPWGYFDFNRFHCHFSPRDWQRLINNNWGFRPKRLNFKLFNIQVKEVTDNNGVKTIANNLTSTVQVFTDSDYQLPYVLGSAHEGCLPPFPADVFMIPQYGYLTLNDGSQAVGRSSFYCLEYFPSQMLRTGNNFQFSYEFENVPFHSSYAHSQSLDRLMNPLIDQYLYYLSKTISGSGQNQQTLKFSVAGPSNMAVQGRNYIPGPSYRQQRVSTTVTQNNSSEFAWPGASSWALNGRNSLMNPGPAMASHKEGEDRFFPLSGSLIFGKQGTGRDNVDADKVMITNEEEIKTTNPVATESYGQVATNHQSAQAQAQTGWVQNQGILSGMVWQDRDVYLQGPIWAKIPHTDGNFHPSPLMGGFGMKHPPPQILIKNTPVPADPPTAFNKDKLNSFITQYSTGQVSVEIEWELQKENSKRWNPEIQYTSNYYKSNNVEFAVNTEGVYSEPRPIGTRYLTRNL

SEQ ID NO: 718 - DNA, 2208 bp, Artificial Sequence
  Description of Artificial Sequence: Synthetic polynucleotide
atggctgccgatggttatcttccagattggctcgaggacaaccttagtgaaggaattcgcgagtggtgggctttgaaacctggagcccctcaacccaaggcaaatcaacaacatcaagacaacgctcgaggtcttgtgcttccgggttacaaataccttggacccggcaacggactcgacaagggggagccggtcaacgcagcagacgcggcggccctcgagcacgacaaggcctacgaccagcagctcaaggccggagacaacccgtacctcaagtgcaaccacgccgacgccgagttccaggagcggctcaaagaagatacgtcttttgggggcaacctcgggcgagcagtcttccaggccaaaaagaggcttcttgaacctcttggtctggttgaggaagcggctaagacggctcctggaaagaagaggcctgtagagcagtctcctcaggaaccggactcctccgcgggtattggcaaatcgggtgcacagcccgctaaaaagagactcaatttcggtcagactggcgacacagagtcagtcccagaccctcaaccaatcggagaacctcccgcagccccctcaggtgtgggatctcttacaatggcttcaggtggtggcgcaccagtggcagacaataacgaaggtgccgatggagtgggtagttcctcgggaaattggcattgcgattcccaatggctgggggacagagtcatcaccaccagcacccgaacctgggccctgcccacctacaacaatcacctctacaagcaaatctccaacagcacatctggaggatcttcaaatgacaacgcctacctcggctacagcaccccctgggggtattttgacttcaacagattccactgccacttctcaccacgtgactggcagcgactcatcaacaacaactggggattccggcctaagcgactcaacttcaagctcttcaacattcaggtcaaagaggttacggacaacaatggagtcaagaccatcgccaataaccttaccagcacggtccaggtcttcacggactcagactatcagctcccgtacgtgctcgggtcggctcacgagggctgcctcccgccgttcccagcggacgttttcatgattcctcagtacgggtatctgacgcttaatgatggaagccaggccgtgggtcgttcgtccttttactgcctggaatatttcccgtcgcaaatgctaagaacgggtaacaacttccagttcagctacgagtttgagaacgtacctttccatagcagctacgctcacagccaaagcctggaccgactaatgaatccactcatcgaccaatacttgtactatctctcaaagactattaacggttctggacagaatcaacaaacgctaaaattcagtgtggccggacccagcaacatggctgtccagggaagaaactacatacctggacccagctaccgacaacaacgtgtctcaaccactgtgactcaaaacaacaacagcgaatttgcttggcctggagcttcttcttgggctctcaatggacgtaatagcttgatgaatcctggacctgctatggccagccacaaagaaggagaggaccgtttctttcctttgtctggatctttaatttttggcaaacaaggaactggaagagacaacgtggatgcggacaaagtcatgataaccaacgaagaagaaattaaaactactaacccggtagcaacggagtcctatggacaagtggccacaaaccaccagagtgcccaagcacaggcgcagaccggctgggttcaaaaccaaggaatacttccgggtatggtttggcaggacagagatgtgtacctgcaaggacccatttgggccaaaattcctcacacggacggcaactttcacccttctccgctgatgggagggtttggaatgaagcacccgcctcctcagatcctcatcaaaaacacacctgtacctgcggatcctccaacggccttcaacaaggacaagctgaactctttcatcacccagtattctactggccaagtcagcgtggagatcgagtgggagctgcagaaggaaaacagcaagcgctggaacccggagatccagtacacttccaactattacaagtctaataatgttgaatttgctgttaatactgaaggtgtatatagtgaaccccgccccattggcaccagatacctgactcgtaatctg

SEQ ID NO: 719 - protein, 736 aa, Artificial Sequence
  Description of Artificial Sequence: Synthetic polypeptide
MAADGYLPDWLEDNLSEGIREWWALKPGAPQPKANQQHQDNARGLVLPGYKYLGPGNGLDKGEPVNAADAAALEHDKAYDQQLKAGDNPYLKCNHADAEFQERLKEDTSFGGNLGRAVFQAKKRLLEPLGLVEEAAKTAPGKKRPVEQSPQEPDSSAGIGKSGAQPAKKRLNFGQTGDTESVPDPQPIGEPPAAPSGVGSLTMASGGGAPVADNNEGADGVGSSSGNWHCDSQWLGDRVITTSTRTWALPTYNNHLYKQISNSTSGGSSNDNAYLGYSTPWGYFDFNRFHCHFSPRDWQRLINNNWGFRPKRLNFKLFNIQVKEVTDNNGVKTIANNLTSTVQVFTDSDYQLPYVLGSAHEGCLPPFPADVFMIPQYGYLTLNDGSQAVGRSSFYCLEYFPSQMLRTGNNFQFSYEFENVPFHSSYAHSQSLDRLMNPLIDQYLYYLSKTINGSGQNQQTLKFSVAGPSNMAVQGRNYIPGPSYRQQRVSTTVTQNNNSEFAWPGASSWALNGRNSLMNPGPAMASHKEGEDRFFPLSGSLIFGKQGTGRDNVDADKVMITNEEEIKTTNPVATESYGQVATNHQSAQAQAQTGWVQNQGILPGMVWQDRDVYLQGPIWAKIPHTDGNFHPSPLMGGFGMKHPPPQILIKNTPVPADPPTAFNKDKLNSFITQYSTGQVSVEIEWELQKENSKRWNPEIQYTSNYYKSNNVEFAVNTEGVYSEPRPIGTRYLTRNL

SEQ ID NO: 720 - DNA, 2208 bp, Artificial Sequence
  Description of Artificial Sequence: Synthetic polynucleotide
atggctgccgatggttatcttccagattggctcgaggacaaccttagtgaaggaattcgcgagtggtgggctttgaaacctggagcccctcaacccaaggcaaatcaacaacatcaagacaacgctcgaggtcttgtgcttccgggttacaaataccttggacccggcaacggactcgacaagggggagccggtcaacgcagcagacgcggcggccctcgagcacgacaaggcctacgaccagcagctcaaggccggagacaacccgtacctcaagtgcaaccacgccgacgccgagttccaggagcggctcaaagaagatacgtcttttgggggcaacctcgggcgagcagtcttccaggccaaaaagaggcttcttgaacctcttggtctggttgaggaagcggctaagacggctcctggaaagaagaggcctgtagagcagtctcctcaggaaccggactcctccgcgggtattggcaaatcgggtgcacagcccgctaaaaagagactcaatttcggtcagactggcgacacagagtcagtcccagaccctcaaccaatcggagaacctcccgcagccccctcaggtgtgggatctcttacaatggcttcaggtggtggcgcaccagtggcagacaataacgaaggtgccgatggagtgggtagttcctcgggaaattggcattgcgattcccaatggctgggggacagagtcatcaccaccagcacccgaacctgggccctgcccacctacaacaatcacctctacaagcaaatctccaacagcacatctggaggatcttcaaatgacaacgcctacctcgactacagcaccccctgggggtattttgacttcaacagattccactgccacttctcaccacgtgactggcagcggctcatcaacaacaactggggattccggcctaagcgactcaacttcaagctcttcaacattcaggtcaaagaggttacggacaacaatggagtcaagaccatcgccaataaccttaccagcacggtccaggtcttcacggactcagactatcagctcccgtacgtgctcgggtcggctcacgagggctgcctcccgccgttcccagcggacgttttcatgattcctcagtacgggtatctgacgcttaatgatggaagccaggccgtgggtcgttcgtccttttactgcctggaatatttcccgtcgcaaatgctaagaacgggtaacaacttccagttcagctacgagtttgagaacgtacctttccatagcagctacgctcacagccaaagcctggaccgactaatgaatccactcatcgaccaatacttgtactatctctcaaagactattaacggttctggacagaatcaacaaacgctaaaattcagtgtggccggacccagcaacatggctgtccagggaagaaactacatacctggacccagctaccgacaacaacgtgtctcaaccactgtgactcaaaacaacaacagcgaatttgcttggcctggagcttcttcttgggctctcaatggacgtaatagcttgatgaatcctggacctgctatggccagccacaaagaaggagaggaccgtttctttcctttgtctggatctttaatttttggcaaacaaggaactggaagagacaacgtggatgcggacaaagtcatgataaccaacgaagaagaaattaaaactactaacccggtagcaacggagtcctatggacaagtggccacaaaccaccagagtgcccaagcacaggcgcagaccggctgggttcaaaaccaaggaatacttccgggtatggtttggcagggcagagatgtgtacctgcaaggacccatttgggccaaaattcctcacacggacggcaactttcacccttctccgctgatgggagggtttggaatgaagcacccgcctcctcagatcctcatcaaaaacacacctgtacctgcggatcctccaacggccttcaacaaggacaagctgaactctttcatcacccagtattctactggccaagtcagcgtggagatcgagtgggagctgcagaaggaaaacagcaagcgctggaacccggagatccagtacacttccaactattacaagtctaataatgttgaatttgctgttaatactgaaggtgtatatagtgaaccccgccccattggcaccagatacctgactcgtaatctg

SEQ ID NO: 721 - protein, 736 aa, Artificial Sequence
  Description of Artificial Sequence: Synthetic polypeptide
MAADGYLPDWLEDNLSEGIREWWALKPGAPQPKANQQHQDNARGLVLPGYKYLGPGNGLDKGEPVNAADAAALEHDKAYDQQLKAGDNPYLKCNHADAEFQERLKEDTSFGGNLGRAVFQAKKRLLEPLGLVEEAAKTAPGKKRPVEQSPQEPDSSAGIGKSGAQPAKKRLNFGQTGDTESVPDPQPIGEPPAAPSGVGSLTMASGGGAPVADNNEGADGVGSSSGNWHCDSQWLGDRVITTSTRTWALPTYNNHLYKQISNSTSGGSSNDNAYLDYSTPWGYFDFNRFHCHFSPRDWQRLINNNWGFRPKRLNFKLFNIQVKEVTDNNGVKTIANNLTSTVQVFTDSDYQLPYVLGSAHEGCLPPFPADVFMIPQYGYLTLNDGSQAVGRSSFYCLEYFPSQMLRTGNNFQFSYEFENVPFHSSYAHSQSLDRLMNPLIDQYLYYLSKTINGSGQNQQTLKFSVAGPSNMAVQGRNYIPGPSYRQQRVSTTVTQNNNSEFAWPGASSWALNGRNSLMNPGPAMASHKEGEDRFFPLSGSLIFGKQGTGRDNVDADKVMITNEEEIKTTNPVATESYGQVATNHQSAQAQAQTGWVQNQGILPGMVWQGRDVYLQGPIWAKIPHTDGNFHPSPLMGGFGMKHPPPQILIKNTPVPADPPTAFNKDKLNSFITQYSTGQVSVEIEWELQKENSKRWNPEIQYTSNYYKSNNVEFAVNTEGVYSEPRPIGTRYLTRNL

SEQ ID NO: 722 - DNA, 2208 bp, Artificial Sequence
  Description of Artificial Sequence: Synthetic polynucleotide
atggctgccgatggttatcttccagattggctcgaggacaacctctctgagggcattcgcgagtggtgggacttgaaacctggagctccgaagcccaaagccaaccagcaaaagcaggacgacggccggggtctggtgcttcctggctacaagtacctcggacccttcaacggactcgacaagggggagcccgtcaacgcggcggacgcagcggccctcgagcacgacaaggcctacgaccagcagctcaaagcgggtgacaatccgtacctgcggtataaccacgccgacgccgagtttcaggagcgtctgcaagaagatacgtcttttgggggcaacctcgggcgagcagtcttccaggccaagaagcgggttctcgaacctctcggtctggttgaggaaggcgctaagacggctcctggaaagaaacgtccggtagagcagtcgccacaagagccagactcctcctcgggcatcggcaagacaggccagcagcccgctaaaaagagactcaattttggtcagactggcgactcagagtcagtccccgatccacaacctctcggagaacctccagcaacccccgctgctgtgggacctactacaatggcttcaggcggtggcgcaccaatggcagacaataacgaaggcgccgacggagtgggtaatgcctcaggaaattggcattgcgattccacatggctgggcgacagagtcatcaccaccagcacccgcacctgggccttgcccacctacaataaccacctctacaagcaaatctccagtgcttcaacgggggccagcaacgacaaccactacttcggctacagcaccccctgggggtattttgatttcaacagattccactgccacttttcaccacgtgactggcagcgactcatcaacaacaattggggattccggcccaagagactcaacttcaaactcttcaacatccaagtcaaggaggtcacgacgaatgatggcgtcacaaccatcgctaataaccttaccagcacggttcaagtcttctcggactcggagtaccagcttccgtacgtcctcggctctgcgcaccagggctgcctccctccgttcccggcggacgtgttcatgattccgcaatacggctacctgacgctcaacaatggcagccaagccgtgggacgttcatccttttactgcctggaatatttcccttctcagatgctgagaacgggcaacaactttaccttcagctacacctttgaggaagcgcctttccacagcagctacgcgcacagccagagcctggaccggctgatgaatcctctcatcgaccaatacctgtattacctgaacagaactcaaaatcagtccggaagtgcccaaaacaaggacttgctgtttagccgtgggtctccagctggcatgtctgttcagcccaaaaactggctacctggaccctgttatcggcagcagcgcgtttctaaaacaaaaacagacaacaacaacagcaattttacctggactggtgcttcaaaatataacctcaatgggcgtgaatccatcatcaaccctggcactgctatggcctcacacaaagacgacgaagacaagttctttcccatgagcggtgtcatgatttttggaaaagagagcgccggagcttcaaacactgcattggacaatgtcatgattacagacgaagaggaaattaaagccactaaccctgtggccaccgaaagatttgggaccgtggcagtcaatttccagagcagcagcacagaccctgcgaccggagatgtgcatgctatgggagcattacctggcatggtgtggcaagatagagacgtgtacctgcagggtcccatttgggccaaaattcctcacacagatggacactttcacccgtctcctcttatgggcggctttggactcaagaacccgcctcctcagatcctcatcaaaaacacgcctgttcctgcgaatcctccggcggagttttcagctacaaagtttgcttcattcatcacccaatactccacaggacaagtgagtgtggaaattgaatgggagctgcagaaagaaaacagcaagcgctggaatcccgaagtgcagtacacatccaattatgcgaaatctgccaacgttgattttactgtggacaacaatggactttatactgagcctcgccccgttggcacccgttaccttacccgtcccctg

SEQ ID NO: 723 - protein, 736 aa, Artificial Sequence
  Description of Artificial Sequence: Synthetic polypeptide
MAADGYLPDWLEDNLSEGIREWWDLKPGAPKPKANQQKQDDGRGLVLPGYKYLGPFNGLDKGEPVNAADAAALEHDKAYDQQLKAGDNPYLRYNHADAEFQERLQEDTSFGGNLGRAVFQAKKRVLEPLGLVEEGAKTAPGKKRPVEQSPQEPDSSSGIGKTGQQPAKKRLNFGQTGDSESVPDPQPLGEPPATPAAVGPTTMASGGGAPMADNNEGADGVGNASGNWHCDSTWLGDRVITTSTRTWALPTYNNHLYKQISSASTGASNDNHYFGYSTPWGYFDFNRFHCHFSPRDWQRLINNNWGFRPKRLNFKLFNIQVKEVTTNDGVTTIANNLTSTVQVFSDSEYQLPYVLGSAHQGCLPPFPADVFMIPQYGYLTLNNGSQAVGRSSFYCLEYFPSQMLRTGNNFTFSYTFEEAPFHSSYAHSQSLDRLMNPLIDQYLYYLNRTQNQSGSAQNKDLLFSRGSPAGMSVQPKNWLPGPCYRQQRVSKTKTDNNNSNFTWTGASKYNLNGRESIINPGTAMASHKDDEDKFFPMSGVMIFGKESAGASNTALDNVMITDEEEIKATNPVATERFGTVAVNFQSSSTDPATGDVHAMGALPGMVWQDRDVYLQGPIWAKIPHTDGHFHPSPLMGGFGLKNPPPQILIKNTPVPANPPAEFSATKFASFITQYSTGQVSVEIEWELQKENSKRWNPEVQYTSNYAKSANVDFTVDNNGLYTEPRPVGTRYLTRPL

SEQ ID NO: 724 - protein, 736 aa, Artificial Sequence
  Description of Artificial Sequence: Synthetic polypeptide
MAADGYLPDWLEDNLSEGIREWWALKPGAPQPKANQQHQDNARGLVLPDYKYLGPGNGLDKGEPVNAADVAALEHDKAYDQQLKAGDNPYLKYNHADAEFQERLKEDTSFGGNLGRAVFQAKKRLLEPLGLVEEAAKTAPGKKRPVEQSPQEPDSSAGIGKSGAQPAKKRLNFGQTGDTESVPDPQPIGEPPAAPSGVGSLTMASGGGAPVADNNEGADGVGSSSGNWHCDSQWLGDGVITTSTRTWALPTYNNHLYKQISNSTSGGSSNDNAYFGYSTPWGYFDFNRFHCHFSPRDWQRLINNNWGFRPKRLNFKLFNIQVKEVTDNNGVKTIANNLTSTVQVFTDSDYQLPYVLGSAHEGCLPPFPADVFMIPQYGYLTLNDGSQAVGRSSFYCLEYFPSQMLRTGNNFQFSYEFENVPFHSSYAHSQSLDRLMNPLIDQYLHYLPKTINGSGQNQQTLKFSVAGPSNMAVQGRNYIPGPSYRQQRVSTTVTQNNNSEFAWPGASSWALNGRNSLMNPGPAMASYKEGEDSFFPLSGSLIFGKQGTGRDNVDADKVMITNEEEIKTTNPVATESYGQVATNHQSAQAQAQTGWVQNQGILPGMVWQDRDVYLQGPIWAKIPHTDGNFHPSPLMGGFGMKHPPPQTLIKNTPVPADPPTAFNKDKLNSFITQYSTGQVSVEIEWELQKENSKRWNPEIQYTSNYYKSNNVEFAVNTEGVYSEPRPIGTRYLTRNL

SEQ ID NO: 725 - protein, 736 aa, Artificial Sequence
  Description of Artificial Sequence: Synthetic polypeptide
MAADGYLPDWLEDNLSEGIREWWALKPGAPQPKANQQHQDNARGLVLPGYKYLGPGNGLDKGEPVNAADAAALEHDKAYDQQLKAGDNPYLKYNHADAEFQERLKEDTSFGGNLGRAVFQAKKRLLEPLGLVEEAAKTAPGKKRPVEQSPQEPDSSAGIGKSGAQPAKKRLNFGQTGDTESVPDPQPIGEPPAAPSGVGSLTMASGGGAPVADNNEGADGVGSSSGNWHCDSQWLGDRVITTSTRTWALPTYNNHLYKQISNSTSGGSSNDNAYFGYSTPWGYFDFNRFHCHFSPRDWQRLINNNWGFRPKRLNFKLFNIQVKEVTDNNGVKTIANNLTSTVQVFTDSDYQLPYVLGSAHEGCLPPFPADVFMIPQYGYLTLNDGSQAVGRSSFYCLEYFPSQMLRTGNNFQFSYEFENVPFHSSYAHSQSLDRLMNPLIDQYLHYLSKTINGSGQNQQTLKFSVAGPSNMAVQGRNYIPGPSYRQQRVSTTVTQNNNSEFAWPGASSWALNGRNSLMNPGPAMASYKEGEDSFFPLSGSLIFGKQGTGRDNVDADKVMITNEEEIKTTNPVATESYGQVATNHQSAQAQAQTGWVQNQGILPGMVWQDRDVYLQGPIWAKIPHTDGNFHPSPLMGGFGMKHPPPQTLIKNTPVPADPPTAFNKDKLNSFITQYSTGQVSVEIEWELQKENSKRWNPEIQYTSNYYKSNNVEFAVNTEGVYSEPRPIGTRYLTRNL

SEQ ID NO: 726 - protein, 736 aa, Artificial Sequence
  Description of Artificial Sequence: Synthetic polypeptide
MAADGYLPDWLEDNLSEGIREWWALKPGAPQPKANQQHQDNARGLVLPGYKYLGPGNGLDKGEPVNAADAAALEHDKAYDQQLKAGDNPYLKYNHADAEFQERLKEDTSFGGNLGRAVFQAKRRLLEPLGLVEEAAKTAPGKKRPVEQSPQEPDSSAGIGKSGAQPAKKRLNFGQTGDTESVPDPQPIGEPPAAPSGVGSLTMASGGGAPVADNNEGADGVGSSSGNWHCDSQWLGDRVITTSTRTWALPTYNNHLYKQISNSTSGGSSNDNAYFGYSTPWGYFDFNRFHCHFSPRDWQRLINNNWGFRPKRLNFKLFNIQIKEVTDNNGVKTIANNLTSTVQVFTDLDYQLPYVLGSAHEGCLPPFPADVFMIPQYGYLTLNDGSQAVGRSSFYCLEYFPSQMLRTGNNFQFSYEFENVPFHSSYAHSQSLDRLMNPLIDQYLHYLSKTINGSGQNQQTLKFSVAGPSNMAVQGRNYIPGPSYRQQRVSTTVTQNNNSEFAWPGASSWALNGRNSLMNPGPAMASYKEGEDSFFPLSGSLIFGKQGTGRDNVDADKVMITNEEEIKTTNPVATESYGQVATNHQSAQAQAQTGWVQNQGILPGMVWQDRDVYLQGPIWAKIPHTDGNFHPSPLMGGFGMKHPPPQTLIKNTPVPADPPTAFNKDKLNSFITQYSTGQVSVEIEWELQKENSKRWNPEIQYTSNYYKSNNVEFAVNTEGVYSEPRPIGTRYLTRNL

SEQ ID NO: 727 - DNA, 2208 bp, Artificial Sequence
  Description of Artificial Sequence: Synthetic polynucleotide
atggctgccgatggttatcttccagattggctcgaggacaacctctctgagggcattcgcgagtggtgggacttgaaacctggagccccgaagcccaaagccaaccagcaaaagcaggacgacggccggggtctggtgcttcctggctacaagtacctcggacccttcaacggactcgacaagggggagcccgtcaacgcggcggacgcagcggccctcgagcacgacaaggcctacgaccagcagctcaaagcgggtgacaatccatacctgcggtataaccacgccgacgccgagtttcaggagcgtctgcaagaaaatacgtcttttgggggcaacctcgggcgagcagtcttccaggccaagaagcgggttctcgaacctctcggtctggttgaggaaggcgctaagacggctcctggaaagaaacgtccggtagagcagtcgccacaagagccagactcctcctcgggcatcggcaagacaggccagcagcccgctaaaaagagactcaattttggtcagactggcgactcagagtcagtccccgatccacaacctctcggagaacctccagcaacccccgctgctgtgggacctactacaatggcttcaggcggtggcgcaccaatggcagacaataacgaaggcgccgacggagtgggtaatgcctcaggaaattggcattgcgattccacatggctgggcgacagagtcatcaccaccagcacccgcacctgggccttgcccacctacaataaccacctctacaagcaaatctccagtgcttcaacgggggccagcaacgacaaccactacttcggctacagcaccccctgggggtattttgatttcaacagattccactgccactttccaccacgtgactggcagcgactcatcaacaacaattggggattccggcccaagagactcaacttcaaactcttcaacatccaagtcaaggaggtcacgtcgaatgatggcgtcacaaccatcgctaataaccttaccagcacggttcaagtcttctcggactcggagtaccagcttccgtacgtcctcggctctgcgcaccagggctgcctccctccgttcccggcggacgtgttcatgattccgcaatacggctacctgacgctcaacaatggcagccaagccgtgggacgttcatccttttactgcctggaatatttcccttctcagatgctgagaacgggcaacaactttaccttcagctacacctttgaggaagtgcctttccacagcagctacgcgcacagccagagcctggaccggctgatgaatcctctcatcgaccaatacctgtattacctgaacagaactcaaaatcagtccggaagtgcccaaaacaaggacttgctgtttagccgtgggtctccagctggcatgtctgttcagcccaaaaactggctacctggtccctgttatcggcagcagcgcgtttctaaaacaaaaacagacaacaacaacagcaattttacctggactggtgcttcaaaatataacctcaatgggcgtgaatccatcatcaaccctggcactgctatggcctcacacaaagacgacgaagacaagttctttcccatgagcggtgtcatgatttttggaaaagagagcgccggagcttcaaacactgcattggacaatgtcatgattacagacgaagaggaaattaaagccactaaccctgtggccaccgaaagatttgggaccgtggcagtcaatttccagagcagcagcacagaccctgcgaccggagatgtgcatgctatgggagcattacctggcatggtgtggcaagatagagacgtgtacctgcagggtcccatttgggccaaaattcctcacacagatggacactttcacccgtctcctcttatgggcggctttggactcaagaacccgcctcctcagatcctcatcaaaaacacgcctgttcctgcgaatcctccggcggagttttcagctacaaagtttgcttcattcatcacccaatactccacaggacaagtgagtgtggaaattgaatgggagctgcagaaagaaaacagcaagcgctggaatcccgaagtgcagtacacatccaattatgcaaaatctgccaacgttgattttactgtggacaacaatggactttatactgagcctcgccccattggcacccgttaccttacccgtcccctg

SEQ ID NO: 728 - protein, 736 aa, Artificial Sequence
  Description of Artificial Sequence: Synthetic polypeptide
MAADGYLPDWLEDNLSEGIREWWDLKPGAPKPKANQQKQDDGRGLVLPGYKYLGPFNGLDKGEPVNAADAAALEHDKAYDQQLKAGDNPYLRYNHADAEFQERLQENTSFGGNLGRAVFQAKKRVLEPLGLVEEGAKTAPGKKRPVEQSPQEPDSSSGIGKTGQQPAKKRLNFGQTGDSESVPDPQPLGEPPATPAAVGPTTMASGGGAPMADNNEGADGVGNASGNWHCDSTWLGDRVITTSTRTWALPTYNNHLYKQISSASTGASNDNHYFGYSTPWGYFDFNRFHCHFPPRDWQRLINNNWGFRPKRLNFKLFNIQVKEVTSNDGVTTIANNLTSTVQVFSDSEYQLPYVLGSAHQGCLPPFPADVFMIPQYGYLTLNNGSQAVGRSSFYCLEYFPSQMLRTGNNFTFSYTFEEVPFHSSYAHSQSLDRLMNPLIDQYLYYLNRTQNQSGSAQNKDLLFSRGSPAGMSVQPKNWLPGPCYRQQRVSKTKTDNNNSNFTWTGASKYNLNGRESIINPGTAMASHKDDEDKFFPMSGVMIFGKESAGASNTALDNVMITDEEEIKATNPVATERFGTVAVNFQSSSTDPATGDVHAMGALPGMVWQDRDVYLQGPIWAKIPHTDGHFHPSPLMGGFGLKNPPPQILIKNTPVPANPPAEFSATKFASFITQYSTGQVSVEIEWELQKENSKRWNPEVQYTSNYAKSANVDFTVDNNGLYTEPRPIGTRYLTRPL

SEQ ID NO: 729 - protein, 736 aa, Artificial Sequence
  Description of Artificial Sequence: Synthetic polypeptide
MAADGYLPDWLEDNLSEGIREWWALKPGAPQPKANQQHQDNARGLVLPGYKYLGPGNGLDKGEPVSAADAAALEHDKAYDQQLKAGDNPYLKYNHADAEFQERLKEDTSFGGNLGRAVFQAKKRLLEPLGLVEEAAKTAPGKKRPVEQSPQEPDSSAGIGKSGAQPAKKRLNFGQTGDTESVSDPQPIGEPPAAPSGVGSLTMASGGGAPVADNNEGADGVGSSSGNWHCDSQWLGDRVITTSTRTWALPTYNNHLYKQISNSTSGGSSNDNAYFGYSTPWGYFDFNRFHCHFSPRDWQRLINNNWGFRPKRLNFKLFNIQVKEVTDNNGVKTIANNLTSTVQVFTDSDYQLPYVLGSAHEGCLPPSPADVFMIPQYGYLTLNDGSQAVGRSSFYCLEYFPSQMLRTGNNFQFSYEFENVPFHSSYAHSQSLDRLMNPLIDQYLHYLSKTINGSGQNQQTLKFSVAGPSNMAVQGRNYIPGPSYRQQRVSTTVTQNNNSEFAWPGASSWALNGRNSLMNPGPAMASYKEGEDSFFPLSGSLIFGKQGTGRDDVDADKVIITNEEEIKTTNPVATESYGQVATNHQSAQAQAQTGWVQNQGILPGMVWQDRDVYLQGPIWAKIPHTDGNFHPSPLMGGFGMKHPPPQTLIKNTPVPADPPTAFNKDKLNSFITQYSTGQVSVEIEWELQKENSKRWNPEIQYTSNYYKSNNVEFAVNTEGVYSEPRPIGTRYLTRNL

SEQ ID NO: 730 - DNA, 2208 bp, Artificial Sequence
  Description of Artificial Sequence: Synthetic polynucleotide
atggctgccgatggttatcttccagattggctcgaggacaacctctctgagggcattcgcgagtggtgggacttgaaacctggagccccgaagcccaaagccaaccagcaaaagcaggacgacggccggggtctggtgcttcctggctacaagtacctcggacccttcaacggactcgacaagggggagcccgtcaacgcggcggacgcagcggccctcgagcacgacaaggcctacgaccagcagctcaaagcgggtgacaatccgtacctgcggtataaccacgccgacgccgagtttcaggagcgtctgcaagaagatacgtcttttgggggcaacctcgggcgagcagtcttccaggccaagaagcgggttctcgaacctctcggtctggttgaggaaggcgctaagacggctcctggaaagaaacgtccggtagagcagtcgccacaagagccagactcctcctcgggcatcggcaagacaggccagcagcccgctaaaaagagactcaattttggtcagactggcgactcagagtcagtccccgatccacaacctctcggagaacctccagcaacccccgctgctgtgggacctactacaatggcttcaggcggtggcgcaccaatggcagacaataacgaaggcgccgacggagtgggtaatgcctcaggaaattggcattgcgattccacatggctgggcgacagagtcatcaccaccagcacccgcacctgggccttgcccacctacaataaccacctctacaagcaaatctccagtgcttcaacgggggccagcaacgacaaccactacttcggctacagcaccccctgggggtattttgatttcaacagattccactgccacttttcaccacgtgactggcagcgactcatcaacaacaattggggattccggcccaagagactcaacttcaaactcttcaacatccaagtcaaggaggtcacgacgaatgatggcgtcacaaccatcgctaataaccttaccagcacggttcaagtcttctcggactcggagtaccagcttccgtacgtcctcggctctgcgcaccagggctgcctccctccgttcccggcggacgtgttcatgattccgcaatacggctacctgacgctcaacaatggcagccaagccgtgggacgttcatccttttactgcctggaatatttcccttctcagatgctgagaacgggcaacaactttaccttcagctacacctttgaggaagtgcctttccacagcagctacgcgcacagccagagcctggaccggctgatgaatcctctcatcgaccaatacctgtattacctgaacagaactcaaaatcagtccggaagtgcccaaaacaaggacttgctgtttagccgtgggtctccagctggcacgtctgttcagcccaaaaactggctacctggaccctgttatcggcagcagcgcgtttctaaaacaaaaacagacaacaacaacagcaattttacctggactggtgcttcaaaatataacctcaatgggcgtgaatccatcatcaaccctggcactgctatggcctcacacaaagacgacgaagacaagttctttcccatgagcggtgtcatgatttttggaaaagagagcgccggagcttcaaacactgcattggacaatgtcatgattacagacgaagaggaaattaaagccactaaccctgtggccaccgaaagatttgggaccgtggcagtcaatttccagagcagcagcacagaccctgcgaccggagatgtgcatgctatgggagcattacctggcatggtgtggcaagatagagacgtgtacctgcagggtcccatttgggccaaaattcctcacacagatggacactttcacccgtctcctcttatgggcggctttggactcaagaacccgcctcctcagatcctcatcaaaaacacgcctgttcctgcgaatcctccggcggagttttcagctacaaagtttgcttcattcatcacccaatactccacaggacaagtgagtgtggaaattgaatgggagctgcagaaagaaaacagcaagcgctggaatcccgaagtgcagtacacatccaattatgcaaaatctgccaacgttgattttactgtggacaacaatggactttatactgggcctcgccccattggcacccgttaccttacccgtcccctg

SEQ ID NO: 731 - protein, 736 aa, Artificial Sequence
  Description of Artificial Sequence: Synthetic polypeptide
MAADGYLPDWLEDNLSEGIREWWDLKPGAPKPKANQQKQDDGRGLVLPGYKYLGPFNGLDKGEPVNAADAAALEHDKAYDQQLKAGDNPYLRYNHADAEFQERLQEDTSFGGNLGRAVFQAKKRVLEPLGLVEEGAKTAPGKKRPVEQSPQEPDSSSGIGKTGQQPAKKRLNFGQTGDSESVPDPQPLGEPPATPAAVGPTTMASGGGAPMADNNEGADGVGNASGNWHCDSTWLGDRVITTSTRTWALPTYNNHLYKQISSASTGASNDNHYFGYSTPWGYFDFNRFHCHFSPRDWQRLINNNWGFRPKRLNFKLFNIQVKEVTTNDGVTTIANNLTSTVQVFSDSEYQLPYVLGSAHQGCLPPFPADVFMIPQYGYLTLNNGSQAVGRSSFYCLEYFPSQMLRTGNNFTFSYTFEEVPFHSSYAHSQSLDRLMNPLIDQYLYYLNRTQNQSGSAQNKDLLFSRGSPAGTSVQPKNWLPGPCYRQQRVSKTKTDNNNSNFTWTGASKYNLNGRESIINPGTAMASHKDDEDKFFPMSGVMIFGKESAGASNTALDNVMITDEEEIKATNPVATERFGTVAVNFQSSSTDPATGDVHAMGALPGMVWQDRDVYLQGPIWAKIPHTDGHFHPSPLMGGFGLKNPPPQILIKNTPVPANPPAEFSATKFASFITQYSTGQVSVEIEWELQKENSKRWNPEVQYTSNYAKSANVDFTVDNNGLYTGPRPIGTRYLTRPL

SEQ ID NO: 732 - protein, 736 aa, Artificial Sequence
  Description of Artificial Sequence: Synthetic polypeptide
MAADGYLPDWLEDNLSEGIREWWALKPGAPQPKANQQHQDNARGLVLPGYKYLGPGNGLDKGEPVNAADAAALEHDKAYDQQLKAGDNPYLKYNHAGAEFQERLKEDTSFGGNLGRAVFQAKKRLLEPLGLVEEAAKTAPGKKRPVEQSPQEPDSSAGIGKSGAQPAKKRLNFGQTGDTESVPDPQPIGEPPAAPSGVGSLTMASGGGAPVADNNEGAGGVGSSSGNWHCDSQWLGDRVVTTSTRTWALPTYNNHLYKQISNSTSGGSSNDNAYFGYSTPWGYFDFNRFHCHFSPRDWQRLINNNWGFRPKRLNFKLFNIQVKEVTDNNGVKTIANNLTSTVQVFTDSDYQLPYVLGSAHGGCLPPFPADVFMIPQYGYLTLNDGSQAVGRSSFYCLEYFPSQMLRTGNNFQFSYEFENVPFHSSYAHSQSLDRLMNPLIDQYLHYLSKTINGSGQNQQTLKFSVAGPSNMAVQGRSYIPGPSYRQQRVSTTVTQNNNSEFAWPGASSWALNGRNSLMNPGPAMASYKEGEDSFFPLSGSLIFGKQGTGRDNVDADKVMITNEEEIKTTNPVATESYGQVATNHQSAQAQAQTGWVQNQGILPGMVWQDRDVYLQGPIWAKIPHTDGNFHPSPLMGGFGMKHPPPQTLIKNTPVPADPPTAFNKDKLNSFITQYSTGQVSVEIEWELQKENSKRWNPEIQYTSNYYKSNNVEFAVNTEGVYSEPRPIGTRYLTRNL

SEQ ID NO: 733 - protein, 736 aa, Artificial Sequence
  Description of Artificial Sequence: Synthetic polypeptide
MAADGYLPDWLEDNLSEGIREWWALKPGAPQPKANQQHQDNARGLVLPGYKYLGPGNGLDKGEPVNAADAAALEHDKAYDQQLKAGDNPYLKYNHADAEFQERLKEDTSFGGNLGRAVFQAKKRLLEPLGLVEEAAKTAPGKKRPVEQSPQEPDSSAGIGKSGAQPAKKRLNFGQTGDTESVPDPQPIGEPPAAPSGVGSLTMASGGGAPVADNNEGADGVGSSSGNWHCDSQWLGDRVVTTSTRTWALPTYNNHLYKQISNSTSGGSSNDNAYFGYSTPWGYFDFNRFHCHFSPRDWQRLINNNWGFRPKRLNFKLFNIQVKEVTDNNGVKTIANNLTSTVQVFTDSDYQLPYVLGSAHEGCLPPFPADVFMIPQYGYLTLNDGSQAVGRSSFYCLEYFPSQMLRTGNNFQFSYEFENVPFHSSHAHSQSLDRLMNPLIDQYLHYLSKTINGSGQNQQTLKFSVAGHSNMAVQGRNYIPGPSYRQQRVSTTVTQNNNSEFAWPGASSWALNGRNSLMNPGPAMASYKEGEDSFFPLSGSLIFGKQGTGRDNVDADKVMITNEEEIKTTNPVATESYGQVATNHQSAQAQAQTGWVQNQGILPGMVWQDRDVYLQGPIWAKIPHTDGNFHPSPLMGGFGMKHPPPQTLIKNTPVPADPPTAFNKDKLNSFITQYSTGQVSVEIGWELQKENSKRWNPEIQYTSNYYKSNNVEFAVNTEGVYSEPRPIGTRYLTRNL

SEQ ID NO: 734 - protein, 736 aa, Artificial Sequence
  Description of Artificial Sequence: Synthetic polypeptide
MAADGYLPDWLEDNLSEGIREWWALKPGAPQPKANQQHQDNARGLVLPGYKYLGPGNGLDKGEPVNAADAAALEHDKAYDQQLKAGDNPYLKYNHADAEFQERLKEDTSFGGNLGRAVFQAKKRLLEPLGLVEEAAKTAPGKKRPVEQSPQEPDSSAGIGKSGAQPAKKRLNFGQTGDTESVPDPQPIGEPPAAPSGVGSLTMASGGGAPVADNNEGADGVGSSSGNWHCDSQWLGDRVITTSTRTWALPTYNNRLYKQISNSTSGGSSNDNAYFGYSTPWGYFDFNRFHCHFSPRDWQRLINNNWGFRPKRLNFKPFNIQVKEVTDNNGVKTIANNLTSTVQVFTDSDYQLPYVLGSAHEGCLPPFPADVFMIPQYGYLTLNDGSQAVGRSSFYCLEYFPSQMLRTGNNFQFSYEFENVPFHSSYAHSQSLDRLMNPLIDQYLHYLSKTINGSGQNQQTLKFSVAGPSNMAVQGRNYIPGPSYRQQRVSTTVTQNNNSEFAWPGASSWALNGRNSLMNPGPAMASYKEGEDSFFPLSGSLIFGKQGTGRDNVDADKVMITNEEEIKTTNPVATESYGQVATNHQSAQAQAQTGWVQNQGILPGMVWQDRDVYLQGPIWAKIPHTDGNFHPSPLMGGFGMKHPPPQTLIKNTPVPADPPTAFNKDKLNSFITQYSTGQVSVEIEWELQKENSKRWNPEIQYTSNYYKSNNVEFAVNTEGVYSEPRPIGTRYLTRNL

SEQ ID NO: 735 - protein, 736 aa, Artificial Sequence; identical to SEQ ID NO: 725
  Description of Artificial Sequence: Synthetic polypeptide

SEQ ID NO: 736 - DNA, 2208 bp, Artificial Sequence
  Description of Artificial Sequence: Synthetic polynucleotide
atggctgccgatggttatcttccagattggctcgaggacaacctctctgagggcattcgcgagtggtgggacttgaaacctggagccccgaagcccaaagccaaccagcaaaagcaggacgacggccggggtctggtgcttcctggctacaagtacctcggacccttcaacggactcgacaagggggagcccgtcaacgcggcggacgcagcggccctcgagcacgacaaggcctacgaccagcagctcaaagcgggtgacaatccgtacctgcggtataaccacgccgacgccgagtttcaggagcgtctgcaagaagatacgtcttttgggggcaacctcgggcgagcagtcttccaggccaagaagcgggttctcgaacctctcggtctggttgaggaaggcgctaagacggctcctggaaagaaacgtccggtagagcagtcgccacaagagccagactcctcctcgggcatcggcaagacaggccagcagcccgctaaaaagagactcaattttggtcagactggcgactcagagtcagtccccgatccacaacctctcggagaacctccagcaacccccgctgctgtgggacctactacaatggcttcaggcggtggcgcaccaatggcagacaataacgaaggcgccgacggagtgggtaatgccccaggaaattggcattgcgactccacatggctgggcgacagagtcatcaccaccagcacccgcacctgggccttgcccacctacaataaccacctctacaagcaaatctccagtgcttcaacgggggccagcaacgacaaccactacttcggctacagcaccccctgggggtattttgatttcaacagattccactgccacttttcaccacgtgactggcagcgactcatcaacaacaattggggattccggcccaagagactcaacttcaaactcttcaacatccaagtcaaggaggtcacgacgaatgatggcgtcacaaccatcgctaataaccttaccagcacggttcaagtcttctcggactcggagtaccagcttccgtacgtcctcggctctgcgcaccagggctgcctccctccgttcccggcggacgtgttcatgattccgcaatacggctacctgacgctcaacaatggcagccaagccgtgggacgttcatccttttactgcctggaatatttcccttctcagatgctgagaacgggcaacaactttaccttcagctacacctttgaggaagtgcctttccacagcagctacgcgcacagccagagcctggaccggctgatgaatcctctcatcgaccaatacctgtattacctgaacagaactcaaaatcagtccggaagtgcccaaaacaaggacttgctgtttagccgtgggtctccagctggcatgtctgttcagcccaaaaactggctacctggaccctgttatcggcagcagcgcgtttctaaaacaaaaacagacaacaacaacagcaattttacctggactggtgcttcaaaatataacctcaatgggcgtgaatccatcatcaaccctggcacagctatggcctcacacaaagacgacgaagacaagttctttcccatgagcggtgtcatgatttttggaaaagagagcgccggagcttcaaacactgcattggacaatgtcatgattacaggcgaagaggaaattaaagccactaaccctgtggccaccgaaagatttgggaccgtggcagtcaatttccagagcagcagcacagaccctgcgaccggagatgtgcatgctatgggagcattacctggcatggtgtggcaagatagagacgtgtacctgcagggtcccatttgggccaaaattcctcacacagatggacactttcacccgtctcctcttatgggcggctttggactcaagaacccgcctcctcagatcctcatcaaaaacacgcctgttcctgcgaatcctccggcggagttttcagctacaaagtttgcttcattcatcacccaatactccacaggacaagtgagtgtggaaattgaatgggagctgcagaaagaaaacagcaagcgctggaatcccgaagtgcagtacacatccaattatgcaaaatctgccaacgttgattttactgtggacaacaatggactttatactgagcctcgccccattggcacccgttaccttacccgtcccctg

SEQ ID NO: 737 - protein, 736 aa, Artificial Sequence
  Description of Artificial Sequence: Synthetic polypeptide
MAADGYLPDWLEDNLSEGIREWWDLKPGAPKPKANQQKQDDGRGLVLPGYKYLGPFNGLDKGEPVNAADAAALEHDKAYDQQLKAGDNPYLRYNHADAEFQERLQEDTSFGGNLGRAVFQAKKRVLEPLGLVEEGAKTAPGKKRPVEQSPQEPDSSSGIGKTGQQPAKKRLNFGQTGDSESVPDPQPLGEPPATPAAVGPTTMASGGGAPMADNNEGADGVGNAPGNWHCDSTWLGDRVITTSTRTWALPTYNNHLYKQISSASTGASNDNHYFGYSTPWGYFDFNRFHCHFSPRDWQRLINNNWGFRPKRLNFKLFNIQVKEVTTNDGVTTIANNLTSTVQVFSDSEYQLPYVLGSAHQGCLPPFPADVFMIPQYGYLTLNNGSQAVGRSSFYCLEYFPSQMLRTGNNFTFSYTFEEVPFHSSYAHSQSLDRLMNPLIDQYLYYLNRTQNQSGSAQNKDLLFSRGSPAGMSVQPKNWLPGPCYRQQRVSKTKTDNNNSNFTWTGASKYNLNGRESIINPGTAMASHKDDEDKFFPMSGVMIFGKESAGASNTALDNVMITGEEEIKATNPVATERFGTVAVNFQSSSTDPATGDVHAMGALPGMVWQDRDVYLQGPIWAKIPHTDGHFHPSPLMGGFGLKNPPPQILIKNTPVPANPPAEFSATKFASFITQYSTGQVSVEIEWELQKENSKRWNPEVQYTSNYAKSANVDFTVDNNGLYTEPRPIGTRYLTRPL

SEQ ID NO: 738 - DNA, 2208 bp, Artificial Sequence
  Description of Artificial Sequence: Synthetic polynucleotide
atggctgccgatggttatcttccagattggctcgaggacaacctctctgagggcattcgcgagtggtgggacttgaaacctggagccccgaagcccaaagccaaccagcaaaagcaggacgacggccggggtctggtgcttcctggctacaagtacctcggacccttcaacagactcgacaagggggagcccgtcaacgcggcggacgcagcggccctcgagcacgacaaggcctacgaccagcagctcaaagcgggtgacaatccgtacctgcggtataaccacgccgacgccgagtttcaggagcgtctgcaagaagatacgtcttttgggggcaacctcgggcgagcagtcttccaggccaagaagcgggttctcgaacctctcggtctggttgaggaaggcgctaagacggctcctggaaggaaacgtccggtagagcagtcgccacaagagccagactcctcctcgggcatcggcaagacaggccagcagcccgctaaaaagagactcaattttggtcagactggcgactcagagtcagtccccgatccacaacctctcggagaacctccagcaacccccgctgctgtgggacctactacaatggcttcaggcggtggcgcgccaatggcagacaataacgaaggcgccgacggagtgggtaatgcctcaggaaattggcattgcgattccacatggctgggcgacagagtcatcaccaccagcacccgcacctgggccttgcccacctacaataaccacctctacaagcaaatctccagtgcttcaacgggggccagcaacgacaaccactacttcggctacagcaccccctgggggtattttgatttcaacagattccactgccacttttcaccacgtgactggcagcgactcatcaacaacaattggggattccggcccaagagactcaacttcaaactcttcaacatccaagtcaaggaggtcacgacgaatgatggcgtcacaaccatcgctaataaccttaccagcacggttcaagtcttctcggactcggagtaccagcttccgtacgtcctcggctctgcgcaccagggctgcctccctccgttcccggcggacgtgttcatgattccgcaatacggctacctgacgctcaacaatggcggccaagccgtgggacgttcatccttttactgcctggaatatttcccttctcagatgctgagaacgggcaacaactttaccttcagctacacctttgaggaagtgcctttccacagcagctacgcgcacagccagagcctggaccggctgatgaatcctctcatcgaccaatacctgtattacctgaacagaactcaaaatcagtccggaagtgcccaaaacaaggacttgctgtttagccgtgggtctccagctggcatgtctgttcagcccaaaaactggctacctggaccctgttatcggcagcagcgcgtttctaaaacaaaaacagacaacaacaacagcaattttacctggactggtgcttcaaaatatagcctcaatgggcgtgaatccatcatcaaccctggcactgctatggcctcacacaaagacgacgaagacaagttctttcccatgggcggtgtcatgatttttggaaaagagagcgccggagcttcaaacactgcattggacaatgccatgattacagacgaagaggaaattaaagccactaaccctgtggccaccgaaagatttgggaccgtggcagtcaatttccagagcagcagcacagaccctgcgaccggagatgtgcatgctatgggagcattacctggcatggtgtggcaagatagagacgtgtacctgcagggtcccatttgggccaaaattcctcacacagatggacactttcacccgtctcctcttatgggcggctttggactcaagaacccgcctcctcagatcctcatcaaaaacacgcctgttcctgcgaatcctccggcggagttttcagctacaaagtttgcttcattcatcacccaatactccacaggacaagtgagtgtggaaattgaatgggagctgcagaaagaaaacagcaagcgctggaatcccgaagtgcagtacacatccaattatgcaaaatctgccaacgttgattttactgtggacaacaatggactttatactgagcctcgccccattggcacccgttaccttacccgtcccctg

SEQ ID NO: 739 - protein, 736 aa, Artificial Sequence
  Description of Artificial Sequence: Synthetic polypeptide
MAADGYLPDWLEDNLSEGIREWWDLKPGAPKPKANQQKQDDGRGLVLPGYKYLGPFNRLDKGEPVNAADAAALEHDKAYDQQLKAGDNPYLRYNHADAEFQERLQEDTSFGGNLGRAVFQAKKRVLEPLGLVEEGAKTAPGRKRPVEQSPQEPDSSSGIGKTGQQPAKKRLNFGQTGDSESVPDPQPLGEPPATPAAVGPTTMASGGGAPMADNNEGADGVGNASGNWHCDSTWLGDRVITTSTRTWALPTYNNHLYKQISSASTGASNDNHYFGYSTPWGYFDFNRFHCHFSPRDWQRLINNNWGFRPKRLNFKLFNIQVKEVTTNDGVTTIANNLTSTVQVFSDSEYQLPYVLGSAHQGCLPPFPADVFMIPQYGYLTLNNGGQAVGRSSFYCLEYFPSQMLRTGNNFTFSYTFEEVPFHSSYAHSQSLDRLMNPLIDQYLYYLNRTQNQSGSAQNKDLLFSRGSPAGMSVQPKNWLPGPCYRQQRVSKTKTDNNNSNFTWTGASKYSLNGRESIINPGTAMASHKDDEDKFFPMGGVMIFGKESAGASNTALDNAMITDEEEIKATNPVATERFGTVAVNFQSSSTDPATGDVHAMGALPGMVWQDRDVYLQGPIWAKIPHTDGHFHPSPLMGGFGLKNPPPQILIKNTPVPANPPAEFSATKFASFITQYSTGQVSVEIEWELQKENSKRWNPEVQYTSNYAKSANVDFTVDNNGLYTEPRPIGTRYLTRPL

SEQ ID NO: 740 - DNA, 2208 bp, Artificial Sequence
  Description of Artificial Sequence: Synthetic polynucleotide
atggctgccgatggttatcttccagattggctcgaggacaacctctctgagggcattcgcgagtggtgggacttgaaacctggagccccgaagcccaaagccaaccagcaaaagcaggacgacggccggggtctggtgcttcctggctacaagtacctcggacccttcaacggactcgacaagggggagcccgtcaacgcggcggacgcagcggccctcgagcacgacaaggcctacgaccagcagctcaaagcgggtgacaatccgtacctgcggtataaccacgccgacgccgagtttcaggagcgtctgcaagaagatacgtcttttgggggcaacctcgggcgagcagtcttccaggccaagaagcgggttctcgaacctctcggtctggttgaggaaggcgctaagacggctcctggaaagaaacgtccggtagagcagtcgccacaagagccagactcctcctcgggcatcggcaagacaggccagcagcccgctaaaaagagactcaattttggtcagactggcgactcagagtcagtccccgatccacaacctctcggagaacctccagcaacccccgctgctgtgggacctactacaatggcttcaggcggtggcgcaccaatggcagacaataacgaaggcgccgacggagtgggtaatgcctcaggaaattggcattgcgattccacatggctgggcggcagagtcatcaccaccagcacccgcacctgggccttgcccacctacaataaccacctctacaagcaaatctccagtgcttcaacgggggccagcaacgacaaccactacttcggctacagcaccccctgggggtattttgatttcaacagattccactgccacttttcaccacgtgactggcagcgactcatcaacaacaattggggattccggcccaagagactcaacttcaaactcttcaacatccaagtcaaggaggtcacgacgaatgatggcgtcacaaccatcgctaataaccttaccagcacggttcaagtcttctcggactcggagtaccagcttccgtacgtcctcggctctgcgcaccagggctgcctccctccgttcccggcggacgtgttcatgattccgcaatacggctacctgacgctcaacaatggcagccaagccgtgggacgttcatccttttactgcctggaatatttcccttctcagatgctgagaacgggcaacaactctaccttcagctacacctttgaggaagtgcctttccacagcagctacgcgcacagccagagcctggaccggctgatgaatcctctcatcgaccaatacctgtattacctgaacagaactcaaaatcagtccggaagtgcccaaaacaaggacttgctgtttagccgtgggtctccagctggcatgtctgttcagcccaaaaactggctacctggaccctgttatcggcagcagcgcgtttctaaaacaaaaacagacaacaacaacagcaattttacctggactggtgcttcaaaatataacctcaatgggcgtgaatccatcatcaaccctggcactgctatggcctcacacaaagacgacgaagacaagttctttcccatgagcggtgtcatgatttttggaaaagagagcgccggagcttcaaacactgcattggacaatgtcatgattacagacgaagaggaaattaaagccactaaccctgtggccaccgaaagatttgggaccgtggcagtcaatttccagagcagcagcacagaccctgcgaccggagatgtgcatgctatgggaacattacctggcatggtgtggcaagatagagacgtgtacctgcagggtcccatttgggccaaaattcctcacacagatggacactttcacccgtctcctcttatgggcggctttggactcaagaacccgcctcctcagatcctcatcaaaaacacgcctgttcctgcgaatcctccggcggagttttcagctacaaagtttgcttcattcatcacccaatactccacaggacaagtgagtgtggaaattgaatgggagctgcagaaagaaaacagcaagcgctggaatcccgaagtgcagtacacatccaattatgcaaaatctgccaacgttgattttactgtggacaacaatggactttatactgagcctcgccccattggcacccgttaccttacccgtcccctg

SEQ ID NO: 741 - protein, 736 aa, Artificial Sequence
  Description of Artificial Sequence: Synthetic polypeptide
MAADGYLPDWLEDNLSEGIREWWDLKPGAPKPKANQQKQDDGRGLVLPGYKYLGPFNGLDKGEPVNAADAAALEHDKAYDQQLKAGDNPYLRYNHADAEFQERLQEDTSFGGNLGRAVFQAKKRVLEPLGLVEEGAKTAPGKKRPVEQSPQEPDSSSGIGKTGQQPAKKRLNFGQTGDSESVPDPQPLGEPPATPAAVGPTTMASGGGAPMADNNEGADGVGNASGNWHCDSTWLGGRVITTSTRTWALPTYNNHLYKQISSASTGASNDNHYFGYSTPWGYFDFNRFHCHFSPRDWQRLINNNWGFRPKRLNFKLFNIQVKEVTTNDGVTTIANNLTSTVQVFSDSEYQLPYVLGSAHQGCLPPFPADVFMIPQYGYLTLNNGSQAVGRSSFYCLEYFPSQMLRTGNNSTFSYTFEEVPFHSSYAHSQSLDRLMNPLIDQYLYYLNRTQNQSGSAQNKDLLFSRGSPAGMSVQPKNWLPGPCYRQQRVSKTKTDNNNSNFTWTGASKYNLNGRESIINPGTAMASHKDDEDKFFPMSGVMIFGKESAGASNTALDNVMITDEEEIKATNPVATERFGTVAVNFQSSSTDPATGDVHAMGTLPGMVWQDRDVYLQGPIWAKIPHTDGHFHPSPLMGGFGLKNPPPQILIKNTPVPANPPAEFSATKFASFITQYSTGQVSVEIEWELQKENSKRWNPEVQYTSNYAKSANVDFTVDNNGLYTEPRPIGTRYLTRPL

SEQ ID NO: 742 - DNA, 2208 bp, Artificial Sequence
  Description of Artificial Sequence: Synthetic polynucleotide
atggctgccgatggttatctcccagattggctcgaggacaacctctctgagggcattcgcgagtggtgggacttgaaacctggagccccgaagcccaaagccaaccagcaaaagcaggacgacggccggggtctggtgcttcctggctacaagtacctcggacccttcaacggactcgacaagggggagcccgtcagcgcggcggacgcagcggccctcgagcacgacaaggcctacgaccagcagctcaaagcgggtgacaatccgtacctgcggtataaccacgccgacgccgagtttcaggagcgtctgcaagaagatacgtcttttgggggcaacctcgggcgagcagtcttccaggccaagaagcgggttctcgaacctctcggtctggttgaggaaggcgctaagacggctcctggaaagaaacgtccggtagagcagtcgccacaagagccagactcctcctcgggcatcggcaagacaggccagcagcccgctaaagagagactcaattttggtcagactggcgactcagagtcagtccccgatccacaacctctcggagaacctccagcaacccccgctgctgtgggacctactacaatggcttcaggcggtggcgcaccaatggcagacaataacgaaggcgccgacggagtgggtaatgcctcaggaaattggcattgcgattccacatggctgggcgacagagtcatcaccaccagcacccgcacctgggccttgcccacctacaataaccacctctacaagcaaatctccagtgcttcaacgggggccagcaacgacaaccactacttcggctacagcaccccctgggggtattttgatttcaacagattccactgccacttttcaccacgtgactggcagcgactcatcaacaacaattggggattccggcccaagagactcaacttcaaactcttcaacatccaagtcaaggaggtcacgacgaatgatggcgtcacaaccatcgccaataaccttaccagcacggttcaagtcttctcggactcggagtaccagcttccgtacgtcctcggctctgcgcaccagggctgcctccctccgttcccggcggacgtgttcatgattccgcaatacggctacctgacgctcaacaatggcagccaagccgtgggacgttcatccttttactgcctggaatatttcccttctcagatgctgagaacgggcaacaactttaccttcagctacacctttgaggaagtgcctttccacagcagctacgcgcacagccagagcctggaccggctgatgaatcctctcatcgaccaatacctgtattacctgaacagaactcaaaatcagtccggaagtgcccaaaacaaggacttgctgtttagccgtgggtctccagctggcatgtctgttcagcccaaaaactggctacctggaccctgttatcggcagcagcgcgtttctaaaacaaaaacagacaacaacaacagcaattttacctggactggtgcttcaaaatataacctcaatgggcgtgaatccatcatcaaccctggcactgctatggcctcacacaaagacgacgaagacaagttctttcccatgagcggtgtcatgatttttggaaaagagagcgccggagcttcaaacactgcattggacaatgtcatgattacagacgaagaggaaattaaagccactaaccctgtggccaccgaaagatttgggaccgtggcagtcaatttccagagcagcagcacagaccctgcgaccggagatgtgcatgctatgggagcattacctggcatggtgtggcaagatagagacgtgtacctgcagggtcccatttgggccaaaattcctcacacagatggacactttcacccgtctcctcttatgggcggctttggactcaagaacccgcctcctcagatcctcatcaaaaacacgcctgttcctgcgaatcctccggcggagttttcagctacaaagtttgcttcattcatcacccaatactccacaggacaagtgagtgtggaaattgaatgggagctgcagaaagaaaacagcaagcgctggaatcccgaagtgcagtacacatccaattatgcaaaatctgccaacgttgattttactgtggacaacaatggactttatactgagcctcgccccattggcacccgttaccttacccgtcccctg

SEQ ID NO: 743 - protein, 736 aa, Artificial Sequence
  Description of Artificial Sequence: Synthetic polypeptide
MAADGYLPDWLEDNLSEGIREWWDLKPGAPKPKANQQKQDDGRGLVLPGYKYLGPFNGLDKGEPVSAADAAALEHDKAYDQQLKAGDNPYLRYNHADAEFQERLQEDTSFGGNLGRAVFQAKKRVLEPLGLVEEGAKTAPGKKRPVEQSPQEPDSSSGIGKTGQQPAKERLNFGQTGDSESVPDPQPLGEPPATPAAVGPTTMASGGGAPMADNNEGADGVGNASGNWHCDSTWLGDRVITTSTRTWALPTYNNHLYKQISSASTGASNDNHYFGYSTPWGYFDFNRFHCHFSPRDWQRLINNNWGFRPKRLNFKLFNIQVKEVTTNDGVTTIANNLTSTVQVFSDSEYQLPYVLGSAHQGCLPPFPADVFMIPQYGYLTLNNGSQAVGRSSFYCLEYFPSQMLRTGNNFTFSYTFEEVPFHSSYAHSQSLDRLMNPLIDQYLYYLNRTQNQSGSAQNKDLLFSRGSPAGMSVQPKNWLPGPCYRQQRVSKTKTDNNNSNFTWTGASKYNLNGRESIINPGTAMASHKDDEDKFFPMSGVMIFGKESAGASNTALDNVMITDEEEIKATNPVATERFGTVAVNFQSSSTDPATGDVHAMGALPGMVWQDRDVYLQGPIWAKIPHTDGHFHPSPLMGGFGLKNPPPQILIKNTPVPANPPAEFSATKFASFITQYSTGQVSVEIEWELQKENSKRWNPEVQYTSNYAKSANVDFTVDNNGLYTEPRPIGTRYLTRPL

SEQ ID NO: 744 - DNA, 2208 bp, Artificial Sequence
  Description of Artificial Sequence: Synthetic polynucleotide
atggctgccgatggttatcttccagattggctcgaggacaacctctctgagggcattcgcgagtggtgggacttgaaacctggagccccgaagcccaaagccaaccagcaaaagcaggacgacggccggggtctggtgcttcctggctacaagtacctcggacccttcaacggactcgacaagggggagcccgtcaacgcggcggacgcagcggccctcgagcacgacaaggcctacgaccagcagctcaaagcgggtgacaatccgtacctgcggtataaccacgccgacgccgagtttcaggagcgtctgcaagaagatacgtcttttgggggcaacctcgggcgagcagtcttccaggccaagaagcgggttctcgaacctctcggtctggttgaggaaggcgctaagacggctcctggaaagaaacgtccggtagagcagtcgccacaagagccagactcctcctcgggcatcggcaagacaggccagcagcccgctaaaaagagactcaattttggtcagactggcgactcagagtcagtccccgatccacaacctctcggagaacctccagcaacccccgctgctgtgggacctactacaatggcttcaggcggtggcgcaccaatggcagacaataacgaaggcgccgacggagtgggtaatgcctcaggaaattggcattgcgattccacatggctgggcgacagagtcatcaccaccagcacccgcacctgggccttgcccacctacaataaccacctctacaagcaaatctccagtgcttcaacgggggccagcaacgacaaccactacttcggctacagcaccccctgggggtattttgatttcaacagattccactgccacttttcaccacgtgactggcagcgactcatcaacaacaattggggattccggcccaagagactcaacttcaaactcttcaacatccaagtcaaggaggtcacgacgaatgatggcgtcacaaccatcgctaataaccttaccagcacggttcaagtcttctcggactcggagtaccagcttccgtacgtcctcggctctgcgcaccagggctgcctccctccgttcccggcggacgtgttcatgattccgcaatacggctacctgacgctcaacaatggcagccaagccgtgggacgttcatccttttactgcctggaatatttcccttctcagatgctgagaacgggcaacaactttaccttcagctacacctttgaggaagtgcctttccacagcagctacgcgcacagccagagcctggaccggctgatgaatcctctcatcgaccaatacctgtattacctgaacagaactcaaaatcagtccggaagtgcccaaaacaaggacttgctgtttagccgtgggtctccagctggcatgtctgttcagcccaaaaactggctacctggaccctgttatcggcagcagcgcgtttctaaaacaaaaacagacaacaacaacagcaattttacctggactggtgcttcaaaatataacctcaatgggcgtgaatccatcatcaaccctggcactgctatggcctcacacaaagacgacgaagacaagttctttcccatgagcggtgtcatgatttttggaaaagagagcgccggagcttcaaacactgcattggacaatgtcatgattacagacgaaggggaaattaaagccactaaccctgtggccaccgaaagatttgggaccgtggcagtcaatttccagagcagcagcacagaccctgcgaccggagatgtgcatgctatgggagcattacctggcatggtgtggcaagatagagacgtgtacctgcagggtcccatttgggccaaaattcctcacacagatggacactttcacccgtctcctcttatgggcggctttggactcaagaacccgcctcctcagatcctcatcaaaaacacgcctgttcctgcgaatcctccggcggagttttcagctacaaagtttgcttcattcatcacccaatactccacaggacaagtgagtgtggaaattgaatgggagctgcagaaagaaaacagcaagcgctggaatcccgaagtgcagtacacatccaattatgcaaaatctgccaacgttgattttactgtggacaacaatggactttatactgagcctcgccccattggcacccgttaccttacccgtcccctg

SEQ ID NO: 745 - protein, 736 aa, Artificial Sequence
  Description of Artificial Sequence: Synthetic polypeptide
MAADGYLPDWLEDNLSEGIREWWDLKPGAPKPKANQQKQDDGRGLVLPGYKYLGPFNGLDKGEPVNAADAAALEHDKAYDQQLKAGDNPYLRYNHADAEFQERLQEDTSFGGNLGRAVFQAKKRVLEPLGLVEEGAKTAPGKKRPVEQSPQEPDSSSGIGKTGQQPAKKRLNFGQTGDSESVPDPQPLGEPPATPAAVGPTTMASGGGAPMADNNEGADGVGNASGNWHCDSTWLGDRVITTSTRTWALPTYNNHLYKQISSASTGASNDNHYFGYSTPWGYFDFNRFHCHFSPRDWQRLINNNWGFRPKRLNFKLFNIQVKEVTTNDGVTTIANNLTSTVQVFSDSEYQLPYVLGSAHQGCLPPFPADVFMIPQYGYLTLNNGSQAVGRSSFYCLEYFPSQMLRTGNNFTFSYTFEEVPFHSSYAHSQSLDRLMNPLIDQYLYYLNRTQNQSGSAQNKDLLFSRGSPAGMSVQPKNWLPGPCYRQQRVSKTKTDNNNSNFTWTGASKYNLNGRESIINPGTAMASHKDDEDKFFPMSGVMIFGKESAGASNTALDNVMITDEGEIKATNPVATERFGTVAVNFQSSSTDPATGDVHAMGALPGMVWQDRDVYLQGPIWAKIPHTDGHFHPSPLMGGFGLKNPPPQILIKNTPVPANPPAEFSATKFASFITQYSTGQVSVEIEWELQKENSKRWNPEVQYTSNYAKSANVDFTVDNNGLYTEPRPIGTRYLTRPL

SEQ ID NO: 746 - DNA, 2208 bp, Artificial Sequence
  Description of Artificial Sequence: Synthetic polynucleotide
atggctgccgatggttatcttccagattggctcgaggacaaccttagtgaaggaattcgcgagtggtgggctttgaaacctggagcccctcaacccaaggcaaatcaacaacatcaagacaacgctcgaggtcttgtgcttccgggttacaaataccttggacccggcaacggactcgacaagggggagccggtcaatgcagcagacgcggcggccctcgagcacgacaaggcctacgaccagcagctcaaggccggagacaacccgtacctcaagtacaaccacgccgacgccgagttccaggagcggctcaaagaagatacgtcttttgggggcaacctcgggcgagcagtcttccagaccaaaaagaggcttcttgaacctcttggtctggttgaggaagcggctaagacggctcctggaaagaagaggcctgtagagcagtctcctcaggaaccgggctcctccgcgggtattggcaaatcgggtgcacagcccgctaaaaagagactcaatttcggtcagactggcgacacagagtcagtcccagaccctcaaccaatcggagaacctcccgcagccccctcaggtgtgggatctcttacaatggcttcaggtggtggcgcaccagtggcagacaataacgaaggtgccgatggagtgggtagttcctcgggaaattggcattgcgattcccaatggctgggggacagagtcatcaccaccagcacccgaacctgggccctgcccacctacaacaatcacctctacaagcaaatctccaacagcacatctggaggatcttcaaatgacaacgcctacttcggctacagcaccccctgggggtattttgacttcaacagattccactgccacttctcaccacgtgactggcagcgactcatcaacaacaactggggattccggcctaagcgactcaacttcaagctcttcaacattcaggtcaaagaggttacggacaacaatggagtcaagaccatcgccaataaccttaccagcacggtccaggtcttcacggactcagactatcagctcccgtacgtgctcgggtcggctcacgagggctgcctcccgccgttcccagcggacgttttcatgattcctcagtacgggtatctgacgcttaatgatggaagccaggccgtgggtcgttcgtccttttactgcctggaatatttcccgtcgcaaatgctaagaacgggtaacaacttccagttcagctacgagtttgagaacgtacctttccatagcagctacgctcacagccaaagcctggaccgactaatgaatccactcatcgaccaatacttgcactatctctcaaagactattaacggttctggacagaatcaacaaacgctaaaattcagtgtggccggacccagcaacatggctgtccagggaagaaactacatacctggacccagctaccgacaacaacgtgtctcaaccactgtgactcaaaacaacaacagcgaatttgcttggcctggagcttcttcttgggctctcaatggacgtaatagcttgatgaatcctggacctgctatggccagccacaaagaaggagaggaccgtttctttcctttgtctggatctttaatttttggcaaacaaggaactggaagagacaacgtggatgcggacaaagtcatgataaccaacgaagaagaaattaaaactactaacccggtagcaacggagtcctatggacaagtggccacaaaccaccagagtgcccaagcacaggcgcagaccggctgggttcaaaaccaaggaatacttccgggtatggtttggcaggacagagatgtgtacctgcaaggacccatttgggccaaaattcctcacacggacggcaactttcacccttctccgctgatgggagggtttggaatgaagcacccgcctcctcagatcctcatcaaaaacacacctgtacctgcggatcctccaacggccttcaacaaggacaagctgaactctttcatcacccagtattctactggccaagtcagcgtggagatcgagtgggagctgcagaaggaaaacagcaagcgctggaacccggagatccagtacacttccaactattacaagtctaataatgttgaatttgctgttaatactgaaggtgtatatagtgaaccccgccccattggcaccagatacctgactcgtaatctg

SEQ ID NO: 747 - protein, 736 aa, Artificial Sequence
  Description of Artificial Sequence: Synthetic polypeptide
MAADGYLPDWLEDNLSEGIREWWALKPGAPQPKANQQHQDNARGLVLPGYKYLGPGNGLDKGEPVNAADAAALEHDKAYDQQLKAGDNPYLKYNHADAEFQERLKEDTSFGGNLGRAVFQTKKRLLEPLGLVEEAAKTAPGKKRPVEQSPQEPGSSAGIGKSGAQPAKKRLNFGQTGDTESVPDPQPIGEPPAAPSGVGSLTMASGGGAPVADNNEGADGVGSSSGNWHCDSQWLGDRVITTSTRTWALPTYNNHLYKQISNSTSGGSSNDNAYFGYSTPWGYFDFNRFHCHFSPRDWQRLINNNWGFRPKRLNFKLFNIQVKEVTDNNGVKTIANNLTSTVQVFTDSDYQLPYVLGSAHEGCLPPFPADVFMIPQYGYLTLNDGSQAVGRSSFYCLEYFPSQMLRTGNNFQFSYEFENVPFHSSYAHSQSLDRLMNPLIDQYLHYLSKTINGSGQNQQTLKFSVAGPSNMAVQGRNYIPGPSYRQQRVSTTVTQNNNSEFAWPGASSWALNGRNSLMNPGPAMASHKEGEDRFFPLSGSLIFGKQGTGRDNVDADKVMITNEEEIKTTNPVATESYGQVATNHQSAQAQAQTGWVQNQGILPGMVWQDRDVYLQGPIWAKIPHTDGNFHPSPLMGGFGMKHPPPQILIKNTPVPADPPTAFNKDKLNSFITQYSTGQVSVEIEWELQKENSKRWNPEIQYTSNYYKSNNVEFAVNTEGVYSEPRPIGTRYLTRNL

SEQ ID NO: 748 - DNA, 2208 bp, Artificial Sequence
  Description of Artificial Sequence: Synthetic polynucleotide
atggctgccgatggttattttccagattggctcgaggacaaccttagtgaaggaattcgcgagtggtgggctttgaaacctggagcccctcaacccaaggcaaatcaacaacatcaagacaacgctcgaggtcttgtgcttccgggttacaaataccttggacccggcaacggactcgacaagggggagccggtcaacgcagcagacgcggcggccctcgagcacgacaaggcctacgaccagcagctcaaggccggagacaacccgtacctcaagtacaaccacgccgacgccgagttccaggagcggctcaaagaagatacgtcttttgggggcaacctcgggcgagcagtcttccaggccaaaaagaggcttcttgaacctcttggtctggttgaggaagcggctaagacggctcctggaaagaagaggcctgtagagcagtctcctcaggaaccggactcctccgcgggtattggcaaatcgggtgcacagcccgctaaaaagagactcaatttcggtcagactggcgacacagagtcagtcccagaccctcaaccaatcggagaatctcccgcagccccctcaggtgtgggatctcttacaatggcttcaggtggtggcgcaccagtggcagacaataacgaaggtgccgatggagtgggtagttcctcgggaaattggcattgcgattcccaatggctgggggacagagtcatcaccaccagcacccgaacctgggccctgcccacctacaacaatcacctctacaagcaaatctccaacagcacatctggaggatcttcaaatgacaacgcctacttcggctacagcaccccctgggggtattttgacttcaacagattccactgccacttctcaccacgtgactggcagcgactcatcaacaacaactggggattccggcctaagcgactcaacttcaagctcttcaacattcaggtcaaagaggttacggacaacaatggagtcaagaccatcgccaataaccttaccagcacggtccaggtcttcacggactcagactatcagctcccgtacgtgctcgggtcggctcacgagggctgcctcccgccgttcccagcggacgttttcatgattcctcagtacgggtatctgacgcttaatgatggaagccaggccgtgggtcgttcgtccttttactgcctggaatatctcccgtcgcaaatgctaagaacgggtaacaacttccagttcagctacgagtttgagaacgtacctttccatagcagctacgctcacagccaaagcctggaccgactaatgaatccactcatcgaccaatacttgcactatctctcaaagactattaacggttctggacagaatcaacaaacgctaaaattcagtgtggccggacccagcaacatggctgtccagggaagaaactacatacctggacccagctaccgacaacaacgtgtctcaaccactgtgactcaaaacaacaacagcgaatttgcttggcctggagcttcttcttgggctctcaatggacgtaatagcttgatgaatcctggacctgctgtggccagccacaaagaaggagaggaccgtttctttcctttgtctggatctttaatttttggcaaacaaggaactggaagagacaacgtggatgcggacaaagtcatgataaccaacgaagaagaaattaaaactactaacccggtagcaacggagtcctatggacaagtggccacaaaccaccagagtgcccaagcacaggcgcagaccggctgggttcaaaaccaaggaatacttccgggtatggtttggcaggacagagatgtgtacctgcaaggacccatttgggccaaaattcctcacacggacggcaactttcacccttctccgctgatgggagggtttggaatgaagcacccgcctcctcagatcctcatcaaaaacacacctgtacctgcggatcctccaacggccttcaacaaggacaagctgaactctttcatcacccagtattctactggccaagtcagcgtggagatcgagtgggagctgcagaaggaaaacagcaagcgctggaacccggagatccagtacacttccaactattacaagtctaataatgttgaatttgctgttaatactgaaggtgtatatagtgaaccccgccccattggcaccagatacctgactcgtaatctg

SEQ ID NO: 749 - protein, 736 aa, Artificial Sequence
  Description of Artificial Sequence: Synthetic polypeptide
MAADGYFPDWLEDNLSEGIREWWALKPGAPQPKANQQHQDNARGLVLPGYKYLGPGNGLDKGEPVNAADAAALEHDKAYDQQLKAGDNPYLKYNHADAEFQERLKEDTSFGGNLGRAVFQAKKRLLEPLGLVEEAAKTAPGKKRPVEQSPQEPDSSAGIGKSGAQPAKKRLNFGQTGDTESVPDPQPIGESPAAPSGVGSLTMASGGGAPVADNNEGADGVGSSSGNWHCDSQWLGDRVITTSTRTWALPTYNNHLYKQISNSTSGGSSNDNAYFGYSTPWGYFDFNRFHCHFSPRDWQRLINNNWGFRPKRLNFKLFNIQVKEVTDNNGVKTIANNLTSTVQVFTDSDYQLPYVLGSAHEGCLPPFPADVFMIPQYGYLTLNDGSQAVGRSSFYCLEYLPSQMLRTGNNFQFSYEFENVPFHSSYAHSQSLDRLMNPLIDQYLHYLSKTINGSGQNQQTLKFSVAGPSNMAVQGRNYIPGPSYRQQRVSTTVTQNNNSEFAWPGASSWALNGRNSLMNPGPAVASHKEGEDRFFPLSGSLIFGKQGTGRDNVDADKVMITNEEEIKTTNPVATESYGQVATNHQSAQAQAQTGWVQNQGILPGMVWQDRDVYLQGPIWAKIPHTDGNFHPSPLMGGFGMKHPPPQILIKNTPVPADPPTAFNKDKLNSFITQYSTGQVSVEIEWELQKENSKRWNPEIQYTSNYYKSNNVEFAVNTEGVYSEPRPIGTRYLTRNL

SEQ ID NO: 750 - DNA, 2208 bp, Artificial Sequence
  Description of Artificial Sequence: Synthetic polynucleotide
atggctgccgatggttatcttccagattggctcgaggacaaccttagtgaaggaattcgcgagtggtgggctttgaaacctggagcccctcaacccaaggcaaatcaacaacatcaagacaacgctcgaggtcttgtgcttccgggttacaaataccttggacccggcaacggactcgacaagggggagccggtcaacgcagcagacgcggcggccctcgagcacgacaaggcctacgaccagcagctcaaggccggagacaacccgtacctcaagtacaaccacgccgacgccgagttccaggagcggctcaaagaagatacgtcttttgggggcaacctcgggcgagcagtcttccaggccaaaaagaggcttcttgaacctcttggtccggttgaggaagcggctaagacggctcctggaaagaagaggcctgtagagcagtctcctcaggaaccggactcctccgcgggtattggcaaatcgggtgcacagcccgctaaaaagagactcaatttcggtcagactggcgacacagagtcagtcccagaccctcaaccaatcggagaacctcccgcagccccctcaggtgtgggatctcttacaatggcttcaggtggtggcgcaccagtggcagacaataacgaaggtgccgatggagtgggtagttcctcgggaaattggcattgcgattcccaatggctgggggacagagtcatcaccaccagcacccgaacctgggccctgcccacctacaacaatcacctctacaagcaaatctccaacagcacatctggaggatcttcaaatgacaacgcctacttcggctacagcaccccctgggggtattttgacttcaacagattccactgccacttctcaccacgtgactggcagcgactcatcaacaacaactggggattccggcctaagcgactcaacttcaagctcttcaacattcaggtcaaagaggttacggacaacaatggagtcaagaccatcgccaataaccttaccagcacggtccaggtcttcacggactcagactatcagctcccgtacgtgctcgggtcggctcacgagggctgcctcccgccgttcccagcggacgttttcatgattcctcagtacgggtatctgacgcttaatgatggaagccaggccgtgggtcgttcgtccttttactgcctggaatatttcccgtcgcaaatgctaagaacgggtaacaacttccagttcagctacgagtttgagaacgtacctttccatagcagctacgctcacagccaaagcctggaccgactaatgaatccactcatcgaccaatacttgtactatctctcaaagactattaacggttctggacagaatcaacaaacgctaaaattcagtgtggccggacccagcaacatggctgtccagggaagaaactacatacctggacccagctaccgacaacaacgtgtctcaaccactgtgactcaaaacaacaacagcgaatttgcttggcctggagcttcttcttgggctctcaatggacgtaatagcttgatgaatcctggacctgctatggccagccacaaagaaggagaggaccgtttctttcctttgtctggatctttaatttttggcaaacaaggaactggaagagacaacgtggatgcggacaaagtcatgataaccaacgaagaagaaattaaaactactaacccggtagcaacggagtcctatggacaagcggccacaaaccaccagagtgcccaagcacaggcgcagaccggctgggttcaaaaccaaggaatacttccgggtatggtttggcaggacagagatgtgtacctgcaaggacccatttgggccaaaattcctcacacggacggcaactttcacccttctccgctgatgggagggtttggaatgaagcacccgcctcctcagatcctcatcaaaaacacacctgtacctgcggatcctccaacggccttcaacaaggacaagctgaactctttcatcacccagtattctactggccaagtcagcgtggagatcgagtgggagctgcagaaggaaaacagcaagcgctggaacccggagatccagtacacttccaactattacaagtctaataatgttgaatttgctgttaatactgaaggtgtatatagtgaaccccgccccattggcaccagatacctgactcgtaatctg

SEQ ID NO: 751 - protein, 736 aa, Artificial Sequence
  Description of Artificial Sequence: Synthetic polypeptide
MAADGYLPDWLEDNLSEGIREWWALKPGAPQPKANQQHQDNARGLVLPGYKYLGPGNGLDKGEPVNAADAAALEHDKAYDQQLKAGDNPYLKYNHADAEFQERLKEDTSFGGNLGRAVFQAKKRLLEPLGPVEEAAKTAPGKKRPVEQSPQEPDSSAGIGKSGAQPAKKRLNFGQTGDTESVPDPQPIGEPPAAPSGVGSLTMASGGGAPVADNNEGADGVGSSSGNWHCDSQWLGDRVITTSTRTWALPTYNNHLYKQISNSTSGGSSNDNAYFGYSTPWGYFDFNRFHCHFSPRDWQRLINNNWGFRPKRLNFKLFNIQVKEVTDNNGVKTIANNLTSTVQVFTDSDYQLPYVLGSAHEGCLPPFPADVFMIPQYGYLTLNDGSQAVGRSSFYCLEYFPSQMLRTGNNFQFSYEFENVPFHSSYAHSQSLDRLMNPLIDQYLYYLSKTINGSGQNQQTLKFSVAGPSNMAVQGRNYIPGPSYRQQRVSTTVTQNNNSEFAWPGASSWALNGRNSLMNPGPAMASHKEGEDRFFPLSGSLIFGKQGTGRDNVDADKVMITNEEEIKTTNPVATESYGQAATNHQSAQAQAQTGWVQNQGILPGMVWQDRDVYLQGPIWAKIPHTDGNFHPSPLMGGFGMKHPPPQILIKNTPVPADPPTAFNKDKLNSFITQYSTGQVSVEIEWELQKENSKRWNPEIQYTSNYYKSNNVEFAVNTEGVYSEPRPIGTRYLTRNL

SEQ ID NO: 752 - DNA, 2208 bp, Artificial Sequence
  Description of Artificial Sequence: Synthetic polynucleotide
atggctgccgatggttatcttccagattggctcgaggacaaccttagtgaaggaattcgcgagtggtgggctttgaaacctggagcccctcaacccaaggcaaatcaacaacatcaagacaacgctcggggtcttgtgcttccgggttacaaataccttggacccggcaacggactcgacaagggggagccggtcaacgcagcagacgcggcggccctcgagcacgacaaggcctacgaccagcagctcaaggccggagacaacccgtacctcaagtacaaccacgccgacgccgagttccaggagcggctcaaagaagatacgtcttttgggggcaacctcgggcgagcagtcttccaggccaaaaagaggcttcttgaacctcttggtccggttgaggaagcggctaagacggctcctggaaagaagaggcctgtagagcagtctcctcaggaaccggactcctccgcgggtattggcaaatcgggtgcacagcccgctaaaaagagactcaatttcggtcagactggcgacacagagtcagtcccagaccctcaaccaatcggagaacctcccgcagccccctcaggtgtgggatctcttacaatggcttcaggtggtggcgcaccagtggcagacaataacgaaggtgccgatggagtgggtagttcctcgggaaattggcattgcgattcccaatggctgggggacagagtcatcaccaccagcacccgaacctgggccctgcccacctacaacaatcacctctacaagcaaatctccaacagcacatctggaggatcttcaaatgacaacgcctacttcggctacagcaccccctgggggtattttgacttcaacagattccactgccacttctcaccacgtgactggcggcgactcatcaacaacaactggggattccggcctaagcgactcaacttcaagctcttcaacattcaggtcaaagaggttacggacaacaatggagtcaagaccatcgccaataaccttaccagcacggtccaggtcttcacggactcagactatcagctcccgtacgtgctcgggtcggctcacgagggctgcctcccgccgttcccagcggacgttttcatgattcctcagtacgggtatctgacgcttaatgatggaagccaggccgtgggtcgttcgtccttttactgcctggaatatttcccgtcgcaaatgctaagaacgggtaacaacttccagttcagctacgagtttgagaacgtacctttccatagcagctacgctcacagccaaagcctggaccgactaatgaatccactcatcgaccaatacttgtactatctctcaaagactattaacggttctggacagaatcaacaaacgctaaaattcagtgtggccggacccagcaacatggctgtccagggaagaaactacatacctggacccagctaccgacaacaacgtgtctcaaccactgtgactcaaaacaacaacagcgaatttgcttggcctggagcttcttcttgggctctcaatggacgtaatagcttgatgaatcctggacctgctatggccagccacaaagaaggagaggaccgtttctttcctttgtctggatctttaatttttggcaaacaaggaactggaagagacaacgtggatgcggacaaagtcatgataaccaacgaagaagaaattaaaactactaacccggtagcaacggagtcctatggacaagtggccacaaaccaccagagtgcccaagcacaggcgcagaccggctgggttcaaaaccaaggaatacttccgggtatggtttggcaggacagagatgtgtacctgcaaggacccatttgggccaaaattcctcacacggacggcaactttcacccttctccgctgatgggagggtttggaatgaagcacccgcctcctcagatcctcatcaaaaacacacctgtacctgcggatcctccaacggccttcaacaaggacaagctgaactctttcatcacccagtattctactggccaagtcagcgtggagatcgagtgggagctgcagaaggaaaacagcaagcgctggaacccggagatccagtacacttccaactattacaagtctaataatgttgaatttgctgttaatactgaaggtgtatatagtgaaccccgccccattggcaccagatacctgactcgtaatctg

SEQ ID NO: 753 - protein, 736 aa, Artificial Sequence
  Description of Artificial Sequence: Synthetic polypeptide
MAADGYLPDWLEDNLSEGIREWWALKPGAPQPKANQQHQDNARGLVLPGYKYLGPGNGLDKGEPVNAADAAALEHDKAYDQQLKAGDNPYLKYNHADAEFQERLKEDTSFGGNLGRAVFQAKKRLLEPLGPVEEAAKTAPGKKRPVEQSPQEPDSSAGIGKSGAQPAKKRLNFGQTGDTESVPDPQPIGEPPAAPSGVGSLTMASGGGAPVADNNEGADGVGSSSGNWHCDSQWLGDRVITTSTRTWALPTYNNHLYKQISNSTSGGSSNDNAYFGYSTPWGYFDFNRFHCHFSPRDWRRLINNNWGFRPKRLNFKLFNIQVKEVTDNNGVKTIANNLTSTVQVFTDSDYQLPYVLGSAHEGCLPPFPADVFMIPQYGYLTLNDGSQAVGRSSFYCLEYFPSQMLRTGNNFQFSYEFENVPFHSSYAHSQSLDRLMNPLIDQYLYYLSKTINGSGQNQQTLKFSVAGPSNMAVQGRNYIPGPSYRQQRVSTTVTQNNNSEFAWPGASSWALNGRNSLMNPGPAMASHKEGEDRFFPLSGSLIFGKQGTGRDNVDADKVMITNEEEIKTTNPVATESYGQVATNHQSAQAQAQTGWVQNQGILPGMVWQDRDVYLQGPIWAKIPHTDGNFHPSPLMGGFGMKHPPPQILIKNTPVPADPPTAFNKDKLNSFITQYSTGQVSVEIEWELQKENSKRWNPEIQYTSNYYKSNNVEFAVNTEGVYSEPRPIGTRYLTRNL

SEQ ID NO: 754 - DNA, 2208 bp, Artificial Sequence
  Description of Artificial Sequence: Synthetic polynucleotide
atggctgccgatggttatcttccagattggctcgaggacaaccttagtgaaggaattcgcgagtggtgggctttgaaacctggagcccctcaacccaaggcaaatcaacaacatcaagacaacgctcgaggtcttgtgcttccgggttacaaataccttggacccggcaacggactcgacaagggggagccggtcaacgcagcagacgcggcggccctcgagcacgacaaggcctacgaccagcagctcaaggccggagacaacctgtacctcaagtacaaccacgccgacgccgagttccaggagcggctcaaagaagatacgtcttttgggggcaacctcgggcgagcagtcttccaggccaaaaagaggcttcttgaacctcttggtctggttgaggaagcggctaagacggctcctggaaagaagaggcctgtagagcagtctcctcaggaaccggactcctccgcgggtattggcaaatcgggtgcacagcccgctaaaaagagactcaatttcggtcagactggcgacacagagtcagtcccagaccctcaaccaatcggagaacctcccgcagccccctcaggtgtgggatctcttacaatggcttcaggtggtggcgcaccagtggcagacaataacgaaggtgccgatggagtgggtagttcctcgggaaattggcattgcgattcccaatggctgggggacagagtcatcaccaccagcacccgaacctgggccctgcccacctacaacaatcacctctacaagcaaatctccaacagcacatctggaggatcttcaaatgacaacgcctacttcggctacagcaccccctgggggtattttgacttcaacagattccactgccacttctcaccacgtgactggcagcgactcatcaacaacaactggggattccggcctaagcgactcaacttcaagctcttcaacattcaggtcaaagaggttacggacaacaatggagtcaagaccatcgccaataaccttaccagcacggtccaggtcttcacggactcagactatcagctcccgtacgtgctcgggtcggctcacgagggctgcctcccgccgttcccagcggacgttttcatgattcctcagtacgggtatctgacgcttaatgatggaagccaggccgtgggtcgttcgtccttttactgcctggaatatttcccgtcgcaaatgctaagaacgggtaacaacttccagttcagctacgagtttgagaacgtacctttccatagcagctacgctcacagccaaagcctggaccgactaatgaatccactcatcgaccaatacttgcactatctctcaaagactattaacggttctggacagaatcaacaaacgctaaaattcagtgtggccggacccagcaacatggctgtccagggaagaaactacatacctggacccagctaccgacaacaacgtgtctcaaccactgtgactcaaaacaacaacagcgaatttgcttggcctggagcttcttcttgggctctcaatggacgtaatagcttgatgaatcctggacctgctatggccagccacaaagaaggagaggaccgtttctttcctttgtctggatctttaatttttggcaaacaaggaactggaagagacaacgtggatgcggacaaagtcatgataaccaacgaagaagaaattaaaactactaacccggtagcaacggagtcctatggacaagtggccacaaaccaccagagtgcccaagcacaggcgcagaccggctgggttcaaaaccaaggaatacttccgggtatggtttggcaggacagagatgtgtacctgcaaggacccatttgggccaaaattcctcacacggacggcaactttcacccttctccgctgatgggagggtttggaatgaagcacccgcctcctcagatcctcatcaaaaacacacctgtacctgcggatcctccaacggccttcaacaaggacaagctgaactctttcatcacccagtattctactggccaagtcagcgtggagatcgagtgggagctgcagaaggaaaacagcaagcgctggaacccggagatccagtacacttccaactattacaagtctaataatgttgaatttgctgttaatactgaaggtgtatatagtgaaccccgccccattggcaccagatacctgactcgtaatctg

SEQ ID NO: 755 - protein, 736 aa, Artificial Sequence
  Description of Artificial Sequence: Synthetic polypeptide
MAADGYLPDWLEDNLSEGIREWWALKPGAPQPKANQQHQDNARGLVLPGYKYLGPGNGLDKGEPVNAADAAALEHDKAYDQQLKAGDNLYLKYNHADAEFQERLKEDTSFGGNLGRAVFQAKKRLLEPLGLVEEAAKTAPGKKRPVEQSPQEPDSSAGIGKSGAQPAKKRLNFGQTGDTESVPDPQPIGEPPAAPSGVGSLTMASGGGAPVADNNEGADGVGSSSGNWHCDSQWLGDRVITTSTRTWALPTYNNHLYKQISNSTSGGSSNDNAYFGYSTPWGYFDFNRFHCHFSPRDWQRLINNNWGFRPKRLNFKLFNIQVKEVTDNNGVKTIANNLTSTVQVFTDSDYQLPYVLGSAHEGCLPPFPADVFMIPQYGYLTLNDGSQAVGRSSFYCLEYFPSQMLRTGNNFQFSYEFENVPFHSSYAHSQSLDRLMNPLIDQYLHYLSKTINGSGQNQQTLKFSVAGPSNMAVQGRNYIPGPSYRQQRVSTTVTQNNNSEFAWPGASSWALNGRNSLMNPGPAMASHKEGEDRFFPLSGSLIFGKQGTGRDNVDADKVMITNEEEIKTTNPVATESYGQVATNHQSAQAQAQTGWVQNQGILPGMVWQDRDVYLQGPIWAKIPHTDGNFHPSPLMGGFGMKHPPPQILIKNTPVPADPPTAFNKDKLNSFITQYSTGQVSVEIEWELQKENSKRWNPEIQYTSNYYKSNNVEFAVNTEGVYSEPRPIGTRYLTRNL

SEQ ID NO: 756 - DNA, 2208 bp, Artificial Sequence
  Description of Artificial Sequence: Synthetic polynucleotide
atggctgccgatggttatcttccagattggctcgaggacaaccttagtgaaggaattcgcgagtggtgggctttgaaacctggagcccctcaacccaaggcaaatcaacaacatcaagacaacgctcgaggtcttgtgcttccgggttacaaataccttggacccggcaacggactcgacaagggggagccggtcaacgcagcagacgcggcggccctcgagcacgacaaggcctacgaccagcagctcaaggccggagacaacccgtacctcaagtacaaccacgccgacgccgagttccaggagcggctcaaagaagatacgtcttttgggggcaacctcgggcgagcagtcttccaggccaaaaagaggcttcttgaacctcttggtctggttgaggaagcggctaagacggctcctggaaagaagaggcctgtagagcagtctcctcaagaaccggactcctccgcgggtattggcaaatcgggtgcacagcccgctaaaaagagactcaatttcggtcagactggcgacacagagtcagtcccagaccctcaaccaatcggagaacctcccgcagccccctcaggtgtgggatctcttacaatggcttcaggtggtggcgcaccagtggcagacaataacgaaggtgccgatggagtgggtagttcctcgggaaattggcattgcgattcccaatggctgggggacagagtcatcaccaccagcacccgaacctgggccctgcccacctacaacaatcacctctacaagcaaatctccaacagcacatctggaggatcttcaaatgacaacgcctacttcggctacagcaccccctgggggtattttgacttcaacagattccactgccacttctcaccacgtgactggcagcgactcatcaacaacaactggggattccggcctaagcgactcaacttcaagctcttcaacattcaggtcaaagaggttacggacaacaatggagtcaagaccatcgccaataaccttaccagcacggtccaggtcttcacggactcagactatcagctcccgtacgtgctcgggtcggctcacgagggctgcctcccgccgttcccagcggacgttttcatgattcctcagtacgggtatctgacgcttaatgatggaagccaggccgtgggtcgttcgtccttttactgcctggaatatttcccgtcgcaaatgctaagaacgggtaacaacttccagttcagctacgagtttgagaacgtacctttccatagcagctacgctcacagccaaagcctggaccgactaatgaatccactcatcgaccaatacttgcactatctctcaaagactattaacggttctggacagaatcaacaaacgctaaaattcagtgtggccggacccagcaacatggctgtccagggaagaaactacatacctggacccagctaccgacaacaacgtgtctcaaccactgtgactcaaaacaacaacagcgaatttgcttggcctggagcttcttcttgggctctcaatggacgtaatagcttgatgaatcctggacctgctatggccagccacaaagaaggagaggaccgtttctttcctttgtctggatctttaatttttggcaaacaaggaactggaagagacaacgtggatgcggacaaagtcatgataaccaacgaagaagaaattaaaactactaacccggtagcaacggagtcctatggacaagtggccacaaaccaccagagtgcccaagcacaggcgcagaccggctgggttcaaaaccaaggaatacttccgggtatggtttggcaggacagagatgtgtacctgcaaggacccatttgggccaaaattcctcacacggacggcaactttcacccttctccgctgatgggagggtttggaatgaagcacccgcctcctcagatcctcatcaaaaacacacctgtacctgcggatcctccaacggccttcaacaaggacaagctgaactctttcatcacccagtattctactggccaagtcagcgtggagatcgagtgggagctgcagaaggaaaacagcaagcgctggaacccggagatccagtacacttccaactattacaagtctaataatgttgaatttgctgttaatactgaaggtgtatatagtgaaccccgccccattggcaccagatacctgactcgtaatctg

SEQ ID NO: 757 - protein, 736 aa, Artificial Sequence
  Description of Artificial Sequence: Synthetic polypeptide
MAADGYLPDWLEDNLSEGIREWWALKPGAPQPKANQQHQDNARGLVLPGYKYLGPGNGLDKGEPVNAADAAALEHDKAYDQQLKAGDNPYLKYNHADAEFQERLKEDTSFGGNLGRAVFQAKKRLLEPLGLVEEAAKTAPGKKRPVEQSPQEPDSSAGIGKSGAQPAKKRLNFGQTGDTESVPDPQPIGEPPAAPSGVGSLTMASGGGAPVADNNEGADGVGSSSGNWHCDSQWLGDRVITTSTRTWALPTYNNHLYKQISNSTSGGSSNDNAYFGYSTPWGYFDFNRFHCHFSPRDWQRLINNNWGFRPKRLNFKLFNIQVKEVTDNNGVKTIANNLTSTVQVFTDSDYQLPYVLGSAHEGCLPPFPADVFMIPQYGYLTLNDGSQAVGRSSFYCLEYFPSQMLRTGNNFQFSYEFENVPFHSSYAHSQSLDRLMNPLIDQYLHYLSKTINGSGQNQQTLKFSVAGPSNMAVQGRNYIPGPSYRQQRVSTTVTQNNNSEFAWPGASSWALNGRNSLMNPGPAMASHKEGEDRFFPLSGSLIFGKQGTGRDNVDADKVMITNEEEIKTTNPVATESYGQVATNHQSAQAQAQTGWVQNQGILPGMVWQDRDVYLQGPIWAKIPHTDGNFHPSPLMGGFGMKHPPPQILIKNTPVPADPPTAFNKDKLNSFITQYSTGQVSVEIEWELQKENSKRWNPEIQYTSNYYKSNNVEFAVNTEGVYSEPRPIGTRYLTRNL

SEQ ID NO: 758 - DNA, 2208 bp, Artificial Sequence
  Description of Artificial Sequence: Synthetic polynucleotide
  misc_feature (1325)..(1325): n is a, c, g, or t
atggctgccgatggttatcttccagattggctcgaggacaaccttagtgaaggaattcgcgagtggtgggctttgaaacctggagcccctcaacccaaggcaaatcaacaacatcaagacaacgctcgaggtcttgtgcttccgggttacaaataccttggacccggcaacggactcgacaagggggagccggtcaacgcagcagacgcggcggccctcgagcacgacaaggcctacgaccagcagctcaaggccggagacaacccgtacctcaagtacaaccacgccgacgccgagttccaggagcggctcaaagaagatacgtcttttgggggcaacctcgggcgagcagtcttccaggccaaaaagaggcttcttgaacctcttggtctggttgaggaagcggctaagacggctcctggaaagaagaggcctgtagagcagtctcctcaggaaccggactcctccgcgggtattggcaaatcgggtgcacagcccgctaaaaagagactcaatttcggtcagactggcgacacagagtcagtcccagaccctcaaccaatcggagaacctcccgcagccccctcaggtgtgggatctcttacaatggcttcaggtggtggcgcaccagtggcagacaataacgaaggtgccgatggagtgggtagttcctcgggaaattggcattgcgattcccaatggctgggggacagagtcatcaccaccagcacccgaacctgggccctgcccacctacaacaatcacctctacaagcaaatctccaccagcacatctggaggatcttcaaatgacaacgcctacttcggctacagcaccccctgggggtattttgacttcaacagattccactgccacttctcaccacgtgactggcagcgactcatcaacaacaactggggattccggcctaagcgactcaacttcaagctcttcaacattcaggtcaaagaggttacggacaacaatggagtcaagaccatcgccaataaccttaccagcacggtccaggtcttcacggactcagactatcagctcccgtacgtgctcgggtcggctcacgagggctgcctcccgccgttcccagcggacgttttcatgattcctcagtacgggtatctgacgcttaatgatggaagccaggccgtgggtcgttcgtccttttactgcctggaatatttcccgtcgcaaatgctaagaacgggtaacaacttccagttcagctacgagtttgagaacgtacctttccatagcagctacgctcacagccaaagcctggaccgactaatgaatccactcatcgaccnatacttgcactatctctcaaagactattaacggttctggacagaatcaacaaacgctaaaattcagtgtggccggacccagcaacatggctgtccagggaagaaactacatacctggacccagctaccgacaacaacgtgtctcaaccactgtgactcaaaacaacaacagcgaatttgcttggcctggagcttcttcttgggctctcaatggacgtaatagcttgatgaatcctggacctgctatggccagccacaaagaaggagaggaccgtttctttcctttgtctggatctttaatttttggcaaacaaggaactggaagagacaacgtggatgcggacaaagtcatgataaccaacgaagaagaaattaaaactactaacccggtagcaacggagtcctatggacaagtggccacaaaccaccagagtgcccaagcacaggcgcagaccggctgggttcaaaaccaaggaatacttccggatatggtttggcaggacagagatgtgtacctgcaaggacccatttgggccaaaattcctcacacggacggcaactttcacccttctccgctgatgggagggtttggaatgaagcacccgcctcctcagatcctcatcaaaaacacacctgtacctgcggatcctccaacggccttcaacaaggacaagctgaactctttcatcacccagtattctactggccaagtcagcgtggagatcgagtgggagctgcagaaggaaaacagcaagcgctggaacccggagatccagtacacttccaactattacaagtctaataatgttgaatttgctgttaatactgaaggtgtatatagtgaaccccgccccattggcaccagatacctgactcgtaatctg

SEQ ID NO: 759 - protein, 736 aa, Artificial Sequence
  Description of Artificial Sequence: Synthetic polypeptide
  MOD_RES (442)..(442): Xaa = any naturally occurring amino acid
MAADGYLPDWLEDNLSEGIREWWALKPGAPQPKANQQHQDNARGLVLPGYKYLGPGNGLDKGEPVNAADAAALEHDKAYDQQLKAGDNPYLKYNHADAEFQERLKEDTSFGGNLGRAVFQAKKRLLEPLGLVEEAAKTAPGKKRPVEQSPQEPDSSAGIGKSGAQPAKKRLNFGQTGDTESVPDPQPIGEPPAAPSGVGSLTMASGGGAPVADNNEGADGVGSSSGNWHCDSQWLGDRVITTSTRTWALPTYNNHLYKQISTSTSGGSSNDNAYFGYSTPWGYFDFNRFHCHFSPRDWQRLINNNWGFRPKRLNFKLFNIQVKEVTDNNGVKTIANNLTSTVQVFTDSDYQLPYVLGSAHEGCLPPFPADVFMIPQYGYLTLNDGSQAVGRSSFYCLEYFPSQMLRTGNNFQFSYEFENVPFHSSYAHSQSLDRLMNPLIDXYLHYLSKTINGSGQNQQTLKFSVAGPSNMAVQGRNYIPGPSYRQQRVSTTVTQNNNSEFAWPGASSWALNGRNSLMNPGPAMASHKEGEDRFFPLSGSLIFGKQGTGRDNVDADKVMITNEEEIKTTNPVATESYGQVATNHQSAQAQAQTGWVQNQGILPDMVWQDRDVYLQGPIWAKIPHTDGNFHPSPLMGGFGMKHPPPQILIKNTPVPADPPTAFNKDKLNSFITQYSTGQVSVEIEWELQKENSKRWNPEIQYTSNYYKSNNVEFAVNTEGVYSEPRPIGTRYLTRNL

SEQ ID NO: 760 - DNA, 2208 bp, Artificial Sequence
  Description of Artificial Sequence: Synthetic polynucleotide
atggctgccgatggttatcttccagattggctcgaggacaaccttagtgaaggaattcgcgagtggtgggctttgaaacctggagcccctcaacccaaggcaaatcaacaacatcaagacaacgctcgaggtcttgtgcttccgggttacaaataccttggacccggcaacggactcgacaagggggagccggtcaacgcagcagacgcggcggccctcgagcacgacaaggcctacgaccagcagctcaaggccggagacaacccgtacctcaagtacaaccacgccgacgccgagttccaggagcggctcaaagaagatacgtcttttgggggcaacctcgggcgagcagtcttccaggccaaaaagaggcttcttgaacctcttggtctggttgaggaagcggctaagacggctcctggaaagaagaggcctgtagagcagtctcctcaggaaccggactcctccgcgggtattggcaaatcgggtgcacagcccgctaaaaagagactcaatttcggtcagactggcgacacagagtcagtcccagaccctcaaccaatcggagaacctcccgcagccccctcaggtgtgggatctcttacaatggcttcaggtggtggcgcaccagtggcagacaataacgaaggtgccgatggagtgggtagttcctcgggaaattggcattgcgattcccaatggctgggggacagagtcatcaccaccagcacccgaacctgggccctgcccacctacaacaatcacctctacaagcaaatctccaacagcacatctggaggatcttcaaatgacaacgcctacttcggctacagcaccccctgggggtattttgacttcaacagattccactgccacttctcaccacgtgactggcagcgactcatcaacaacaactggggattccggcctaagcgactcaacttcaagctcttcaacattcaggtcaaagaggttacggacaacaatggagtcaagaccatcgccaataaccttaccagcacggtccaggtcttcacggactcagactatcagctcccgtacgtgctcgggtcggctcacgagggctgcctcccgccgttcccagcggacgttttcatgattcctcagtacgggtatctgacgcttaatgatggaagccaggccgtgggtcgttcgtccttttactgcctggaatatttcccgtcgcaaatgctaagaacgggtaacaacttccagttcagctacgagtttgagaacgtacctttccatagcagctacgctcacagccaaagcctggaccgactaatgaatccactcatcgaccaatacttgcactatctctcaaagactattaacggttctggacagaatcaacaaacgctaaaattcagtgtggccggacccagcaacatggctgtccagggaagaaactacatacctggacccagctaccgacaacaacgtgtctcaaccactgtgactcaaaacaacaacagcgaatttgcttggcctggagcttcttcttgggctctcaatggacgtaatagcttgatgaatcctggacctgctatggccagctacaaagaaggagaggacagtttctttcctttgtctggatctttaatttttggcaaacaaggaactggaagagacaacgtggatgcggacaaagtcatgataaccaacgaagaagaaattaaaactactaacccggtagcaacggagtcctatggacaagtggccacaaaccaccagagtgcccaagcacaggcgcagaccggctgggttcaaaaccaaggaatacttccgggtatggtttggcaggacagagatgtgtacctgcaaggacccatttgggccaaaattcctcacacggacggcaactttcacccttctccgctgatgggagggtttggaatgaagcacccgcctcctcagaccctcatcaaaaacacacctgtacctgcggatcctccaacggccttcaacaaggacaagctgaactctttcatcacccagtattctactggccaagtcagcgtggagatcgagtgggagctgcagaaggaaaacagcaagcgctggaacccggagatccagtacacttccaactattacaagtctaataatgttgaatttgctgttaatactgaaggtgtatatagtgaaccccgccccattggcaccagatacctgactcgtaatctg

SEQ ID NO: 761 - protein, 736 aa, Artificial Sequence; identical to SEQ ID NO: 725
  Description of Artificial Sequence: Synthetic polypeptide

SEQ ID NO: 762 - DNA, 2175 bp, Artificial Sequence
  Description of Artificial Sequence: Synthetic polynucleotide
atgtcttttgttgatcaccctccagattggttggaagaagttggtgaaggtcttcgcgagtttttgggccttgaagcgggcccaccgaaaccaaaacccaatcagcagcatcaagatcaagcccgtggtcttgtgctgcctggttataactatctcggacccggaaacggtctcgatcgaggagagcctgtcaacagggcagacgaggtcgcgcgagagcacgacatctcgtacaacgagcagcttgaggcgggagacaacccctacctcaagtacaaccacgcggacgccgagtttcaggagaggctcgccgacgacacatccttcgggggaaacctcggaaaggcagtctttcaggccaagaaaagggttctcgaaccttttggcctggttgaagagggtgctaagacggcccctaccggaaagcggatagacgaccactttccaaaaagaaagaaggcccggaccgaagaggactccaagccttccacctcgtcagacgccgaagctggacccagcggatcccagcagctgcaaatcccagcccaaccagcctcaagtttgggagctgatacaatgtctgcgggaggtggcggcccattgggcgacaataaccaaggtgccgatggagtgggcaatgcctcgggagattggcattgcgattccacgtggatgggggacagagtcgtcaccaagtccacccgaacctgggtgctgcccagctacaacaaccaccagtaccgagagatcaaaagcggctccgtcgacggaagcaacgccaacgcctactttggatacagcaccccctgggggtactttgactttaaccgcttccacagccactggagcccccgagactggcaaagactcatcaacaactactggggcttcagaccccggtccctcagagtcaaaatcttcaacattcaagtcaaagaggtcacggtgcaggactccaccaccaccatcgccaacaacctcacctccaccgtccaagtgtttacggacgacgactaccagctgccctacgtcgtcggcaacgggaccgagggatgcctgccggccttccctccgcaggtctttacgctgccgcagtacggttacgcgacgctgaaccgcgacaacacagaaaatcccaccgagaggagcagcttcttctgcctagagtactttcccagcaagatgctgagaacgggcaacaactttgagtttacctacaactttgaggaggtgcccttccactccagcttcgctcccagtcagaacctcttcaagctggccaacccgctggtggaccagtacttgtaccgcttcgtgagcacaaataacactggcggagtccagttcaacaagaacctggccgggagatacgccaacacctacaaaaactggttcccggggcccatgggccgaacccagggctggaacctgggctccggggtcaaccgcgccagtgtcagcgccttcgccacgaccaataggatggagctcgagggcgcgagttaccaggtgcccccgcagccgaacggcatgaccaacaacctccagggcagcaacacctatgccctggagaacactatgatcttcaacagccagccggcgaacccgggcaccaccgccacgtacctcgagggcaacatgctcatcaccagcgagagcgagacgcagccggtgaaccgcgtggcgtacaacgtcggcgggcagatggccaccaacaaccagagctccaccactgcccccgcgaccggcacgtacaacctccaggaaatcgtgcccggcagcgtgtggatggagagggacgtgtacctccaaggacccatctgggccaagatcccagagacggaggcgcactttcacccctctccggccatgggcggattcggactcaaacacccaccgcccatgatgctcatcaagaacacgcctgtgcccggaaatatcaccagcttctcggacgtgcccgtcagcagcttcatcacccagtacagcaccgggcaggtcaccgtggagatggagtgggagctcaagaaggaaaactccaagaggtggaacccagagatccagtacacaaacaactacaacgacccccagtttgtggactttgccccggacagcaccggggaatacagaaccaccagacctatcggaacccgataccttacccgacccctttaa

SEQ ID NO: 763 - protein, 724 aa, Artificial Sequence
  Description of Artificial Sequence: Synthetic polypeptide
MSFVDHPPDWLEEVGEGLREFLGLEAGPPKPKPNQQHQDQARGLVLPGYNYLGPGNGLDRGEPVNRADEVAREHDISYNEQLEAGDNPYLKYNHADAEFQERLADDTSFGGNLGKAVFQAKKRVLEPFGLVEEGAKTAPTGKRIDDHFPKRKKARTEEDSKPSTSSDAEAGPSGSQQLQIPAQPASSLGADTMSAGGGGPLGDNNQGADGVGNASGDWHCDSTWMGDRVVTKSTRTWVLPSYNNHQYREIKSGSVDGSNANAYFGYSTPWGYFDFNRFHSHWSPRDWQRLINNYWGFRPRSLRVKIFNIQVKEVTVQDSTTTIANNLTSTVQVFTDDDYQLPYVVGNGTEGCLPAFPPQVFTLPQYGYATLNRDNTENPTERSSFFCLEYFPSKMLRTGNNFEFTYNFEEVPFHSSFAPSQNLFKLANPLVDQYLYRFVSTNNTGGVQFNKNLAGRYANTYKNWFPGPMGRTQGWNLGSGVNRASVSAFATTNRMELEGASYQVPPQPNGMTNNLQGSNTYALENTMIFNSQPANPGTTATYLEGNMLITSESETQPVNRVAYNVGGQMATNNQSSTTAPATGTYNLQEIVPGSVWMERDVYLQGPIWAKIPETEAHFHPSPAMGGFGLKHPPPMMLIKNTPVPGNITSFSDVPVSSFITQYSTGQVTVEMEWELKKENSKRWNPEIQYTNNYNDPQFVDFAPDSTGEYRTTRPIGTRYLTRPL

SEQ ID NO: 764 - DNA, 2175 bp, Artificial Sequence
  Description of Artificial Sequence: Synthetic polynucleotide
atgtcttttgttgatcaccctccagattggttggaagaagttggtgaaggtcttcgcgagtttttgggccttgaagcgggcccaccgaaaccaaaacccaatcagcagcatcaagatcaagcccgtggtcttgtgctgcctggttataactatctcggacccggaaacggtctcgatcgaggagagcctgtcaacagggcagacgaggtcgcgcgagagcacgacatctcgtacaacgagcagcttgaggcgggagacaacccctacctcaagtacaaccacgcggacgccgagtttcaggagaagctcgccgacgacacatcctccgggggaaacctcggaaaggcagtctttcaggccaagaaaagggttctcgaaccttttggcctggttgaagagggtgctaagacggcccctaccggaaagcggatagacgaccactttccaaaaagaaagaaggcccggaccgaagaggactccaagccttccacctcgtcagacgccgaagctggacccagcggatcccagcagctgcaaatcccagcccaaccagcctcaagtttgggagctgatacaatgtctgcgggaggtggcggcccattgggcgacaataaccaaggtgccgatggagtgggcaatgcctcgggagattggcattgcgattccacgtggatgggggacagagtcgtcaccaagtccacccgaacctgggtgctgcccagctacaacaaccaccagtaccgagagatcaaaagcggctccgtcgacggaagcaacgccaacgcctactttggatacagcaccccctgggggtactttgactttaaccgcttccacagccactggagcccccgagactggcaaagactcatcaacaactactggggcttcagaccccggtccctcagagtcaaaatcttcaacattcaagtcaaagaggtcacggtgcaggactccaccaccaccatcgccaacaacctcacctccaccgtccaagtgtttacggacgacgactaccagctgccctacgtcgtcggcaacgggaccgagggatgcctgccggccttccctccgcaggtctttacgctgccgcagtacggttacgcgacgctgaaccgcgacaacacagaaaatcccaccgagaggagcagcttcttctgcctagagtactttcccagcaagatgctgagaacgggcaacaactttgagtttacctacaactttgaggaggtgcccttccactccagcttcgctcccagtcagaacctcttcaagctggccaacccgctagtggaccagtacttgtaccgcttcgtgagcacaaataacactggcggagtccagttcaacaagaacctggccgggagatacgccaacacctacaaaaactggttcccggggcccatgggccgaacccagggctggaacctgggctccggggtcaaccgcgccagtgtcagcgccttcgccacgaccaataggatggagctcgagggcgcgagttaccaggtgcccccgcagccgaacggcatgaccaacaacctccagggcagcaacacctatgccctggagaacactatgatcttcaacagccagccggcgaacccgggcaccaccgccacgtacctcgagggcaacatgctcatcaccagcgagagcgagacgcagccggtgaaccgcgtggcgtacaacgtcggcgggcagatggccaccaacaaccagagctccaccactgcccccgcgaccggcacgtacaacctccaggaaatcgtgcccggcagcgtgtggatggagagggacgtgtacctccaaggacccatctgggccaagatcccagagacgggggcgcactttcacccctctccggccatgggcggattcggactcaaacacccaccgcccatgatgctcatcaagaacacgcctgtgcccggaaatatcaccagcttctcggacgtgcccgtcagcagcttcatcacccagtacagcaccgggcaggtcaccgtggagatggagtgggagctcaagaaggaaaactccaagaggtggaacccagagatccagtacacaaacaactacaacgacccccagtttgtggactttgccccggacagcaccggggaatacagaaccaccagacctatcggaacccgataccttacccgacccctttaa

SEQ ID NO: 765 - protein, 724 aa, Artificial Sequence
  Description of Artificial Sequence: Synthetic polypeptide
MSFVDHPPDWLEEVGEGLREFLGLEAGPPKPKPNQQHQDQARGLVLPGYNYLGPGNGLDRGEPVNRADEVAREHDISYNEQLEAGDNPYLKYNHADAEFQEKLADDTSSGGNLGKAVFQAKKRVLEPFGLVEEGAKTAPTGKRIDDHFPKRKKARTEEDSKPSTSSDAEAGPSGSQQLQIPAQPASSLGADTMSAGGGGPLGDNNQGADGVGNASGDWHCDSTWMGDRVVTKSTRTWVLPSYNNHQYREIKSGSVDGSNANAYFGYSTPWGYFDFNRFHSHWSPRDWQRLINNYWGFRPRSLRVKIFNIQVKEVTVQDSTTTIANNLTSTVQVFTDDDYQLPYVVGNGTEGCLPAFPPQVFTLPQYGYATLNRDNTENPTERSSFFCLEYFPSKMLRTGNNFEFTYNFEEVPFHSSFAPSQNLFKLANPLVDQYLYRFVSTNNTGGVQFNKNLAGRYANTYKNWFPGPMGRTQGWNLGSGVNRASVSAFATTNRMELEGASYQVPPQPNGMTNNLQGSNTYALENTMIFNSQPANPGTTATYLEGNMLITSESETQPVNRVAYNVGGQMATNNQSSTTAPATGTYNLQEIVPGSVWMERDVYLQGPIWAKIPETGAHFHPSPAMGGFGLKHPPPMMLIKNTPVPGNITSFSDVPVSSFITQYSTGQVTVEMEWELKKENSKRWNPEIQYTNNYNDPQFVDFAPDSTGEYRTTRPIGTRYLTRPL

SEQ ID NO: 766 - DNA, 2175 bp, Artificial Sequence
  Description of Artificial Sequence: Synthetic polynucleotide
atgtcttttgttgatcaccctccagattggttggaagaagttggtgaaggtcttcgcgagtttttgggccttgaagcgggcccaccgaaaccaaaacccaatcagcagcatcaagatcaagcccgtggtcttgtgctgcctggttataactatctcggacccggaaacggtctcgatcgaggagagcctgtcaacagggcagacgaggtcgcgcgagagcacgacatctcgtacaacgagcagcttgaggcgggagacaacccctacctcaagtacaaccacgcggacgccgagtttcaggagaagctcgccgacgacacatccttcgggggaaacctcggaaaggcagtctttcaggccaagaaaagggttctcgaaccttttggcctggttgaagagggtgctaagacggcccctaccggaaagcggatagacgaccactttccaaaaagaaagaaggcccggaccgaagaggactccaagccttccacctcgtcagacgccgaagctggacccagcggatcccagcagctgcaaatcccagcccaaccagcctcaagtttgggagctgatacaatgtctgcgggaggtggcggcccattgggcgacaataaccaaggtgccgatggagtgggcaatgcctcgggagattggcattgcgattccacgtggatgggggacagagtcgtcaccaagtccacccgaacctgggtgctgcccagctacaacaaccaccagtaccgagagatcaaaagcggctccgtcgacggaagcaacgccaacgcctactttggatacagcaccccctgggggtactttgactttaaccgcttccacagccactggagcccccgagactggcaaagactcatcaacaactactggggcttcagaccccggtccctcagagtcaaaatcttcaacattcaagtcaaagaggtcacggtgcaggactccaccaccaccatcgccaacaacctcacctccaccgtccaagtgtttacggacgacgactaccagctgccctacgtcgtcggcaacgggaccgagggatgcctgccggccttccctccgcaggtctttacgctgccgcagtacggttacgcgacactgaaccgcgacaacacagaaaatcccaccgagaggagcagcttcttctgcctagagtactttcccagcaagatgctgagaacgggcaacaactttgagtttacctacaactttgaggaggtgcccttccactccagcttcgctcccagtcagaacctcttcaagctggccaacccgctggtggaccagtacttgtaccgcttcgtgagcacaaataacactggcggagtccagttcaacaagaacctggccgggagatacgccaacacctacaaaaactggttcccggggcccatgggccgaacccagggctggaacctgggctccggggtcaaccgcgccagtgtcagcgccttcgccacgaccaataggatggagctcgagggcgcgagttaccaggtgcccccgcagccgaacggcatgaccaacaacctccagggcagcaacacctatgccctggagaacactatgatcttcaacagccagccggcgaacccgggcaccaccgccacgtacctcgagggcaacatgctcatcaccagcgagagcgagacgcagccggtgaaccgcgtggcgtacaacgtcggcgggcagatggccaccaacaaccagagctccaccactgcccccgcgaccggcacgtacaacctccaggaaatcgtgcccggcagcgtgtggatggagagggacgtgtacctccaaggacccatctgggccaagatcccagagacgggggcgcactttcacccctctccggccatgggcggattcggactcaaacacccaccgcccatgatgctcatcaagagcacgcctgtgcccggaaatatcaccagcttctcggacgtgcccgtcagcagcttcatcacccagtacagcaccgggcaggtcaccgtggagatggagtgggagctcaagaaggaaaactccaagaggtggaacccagagatccagtacacaaacaactacaacgacccccagtttgtggactttgccccggacagcaccggggaatacagaaccaccagacctatcggaacccgataccttacccgacccctttaa

SEQ ID NO: 767 - protein, 724 aa, Artificial Sequence
  Description of Artificial Sequence: Synthetic polypeptide
MSFVDHPPDWLEEVGEGLREFLGLEAGPPKPKPNQQHQDQARGLVLPGYNYLGPGNGLDRGEPVNRADEVAREHDISYNEQLEAGDNPYLKYNHADAEFQEKLADDTSFGGNLGKAVFQAKKRVLEPFGLVEEGAKTAPTGKRIDDHFPKRKKARTEEDSKPSTSSDAEAGPSGSQQLQIPAQPASSLGADTMSAGGGGPLGDNNQGADGVGNASGDWHCDSTWMGDRVVTKSTRTWVLPSYNNHQYREIKSGSVDGSNANAYFGYSTPWGYFDFNRFHSHWSPRDWQRLINNYWGFRPRSLRVKIFNIQVKEVTVQDSTTTIANNLTSTVQVFTDDDYQLPYVVGNGTEGCLPAFPPQVFTLPQYGYATLNRDNTENPTERSSFFCLEYFPSKMLRTGNNFEFTYNFEEVPFHSSFAPSQNLFKLANPLVDQYLYRFVSTNNTGGVQFNKNLAGRYANTYKNWFPGPMGRTQGWNLGSGVNRASVSAFATTNRMELEGASYQVPPQPNGMTNNLQGSNTYALENTMIFNSQPANPGTTATYLEGNMLITSESETQPVNRVAYNVGGQMATNNQSSTTAPATGTYNLQEIVPGSVWMERDVYLQGPIWAKIPETGAHFHPSPAMGGFGLKHPPPMMLIKSTPVPGNITSFSDVPVSSFITQYSTGQVTVEMEWELKKENSKRWNPEIQYTNNYNDPQFVDFAPDSTGEYRTTRPIGTRYLTRPL

SEQ ID NO: 768 - DNA, 2205 bp, Artificial Sequence
  Description of Artificial Sequence: Synthetic polynucleotide
atgactgacggttaccttccagattggctagaggacaacctctctgaaggcgttcgagagtggtgggcgctgcaacctggagcccctaaacccaaggcaaatcaacaacatcaggacaacgctcggggtcttgtgcttccgggttacaaatacctcggacccggcaacggactcgacaagggggaacccgtcaacgcagcggacgcggcagccctcgagcacgacaaggcctacgaccagcagctcaaggccggtgacaacccctacctcaagtacaaccacgccgacgcggagttccagcagcggcttcagggcgacacatcgtttgggggcaacctcggcagagcagtcttccaggccaaaaagagggttcttgaacctcttggtctggttgagcaagcgggtgagacggctcctggaaagaagagaccgttgattgaatccccccagcagcccgactcctccacgggtatcggcaaaaaaggcaagcagccggctaaaaagaagctcgttttcgaagacggaactggagcaggcgacggaccccctgagggatcaacttccggagccatgtctgatgacagtgagatgcgtgcagcagctggcggagctgcagtcgagggcggacaaggtgccgatggagtgggtaatgcctcgggtgattggcattgcgattccacctggtctgagggccacgtcacgaccaccagcaccagaacctgggtcttgcccacctacaacaaccacctctacaagcgactcggagagagcctgcagtccaacacctacaacggattccccaccccctggggatactttgacttcaaccgcttccactgccacttctcaccacgtgactggcagcgactcatcaacaacaactggggcatgcgacccaaagccatgcgggtcaaaatcttcaacatccaggtcaaggaggtcacgacgtcgaacggcgagacaacggcggctaataaccttaccagcacggttcagatctttgcggactcgtcgtacgaactgccgtacgtgatggatgcgggtcaagagggcagcctgcctccttttcccaacgacgtctttatggtgccccagtacggctactgtggactggtgaccggcaacacttcgcagcaacagactgacagaaatgccttctactgcctggagtactttccttcgcagatgctgcggactggcaacaactttgaaattacgtacagttttgagaaggtgcctttccactcgatgtacgcgcacagccagagcctggaccggctgatgaaccctctcatcgaccagtacctgtggggactgcaatcgaccaccaccggaaccaccctgaatgccgggactgccaccaccaactttaccaagctgcggcctaccaacttttccaactttaaaaagaactggctgcccgggccttcaatcaagcagcagggcttctcaaagactgccaatcaaaactacaagatccctgccaccgggtcagacagtctcatcaaatacgagacgcacagcactctggacggaagatggagtgccctgacccccggacctccaatggccacggctggacctgcggacagcaagttcagcaacagccagctcatctttgcggggcctaaacagaacggcaacacggccaccgtacccgggactctgatcttcacctctgaggaggagctggcagccaccaacgccaccgatacggacatgtggggcaacctacctggcggtgaccagagcaacagcaacctgccgaccgtggacagactgacagccttgggagccgtgcctggaatggtctggcaaaacagagacatttactaccagggtcccatttgggccaagattcctcataccgatggacactttcacccctcaccgctgattggtgggtttgggctgaaacacccgcctcctcaaatttttatcaagaacaccccggtacctgcgaatcctgcgacgaccttcagctctactccggtaaactccttcattactcagtacagcactggccaggtgtcggtgcagattgactgggagatccagaaggagcggtccaaacgctggaaccccgaggtccagtttacctccaactacggacagcaaaactctctgttgtgggctcccgatgcggctgggaaatacactgagcctagggctatcggtacccgctacctcacccaccacctgtaa

SEQ ID NO: 769 - protein, 734 aa, Artificial Sequence
  Description of Artificial Sequence: Synthetic polypeptide
MTDGYLPDWLEDNLSEGVREWWALQPGAPKPKANQQHQDNARGLVLPGYKYLGPGNGLDKGEPVNAADAAALEHDKAYDQQLKAGDNPYLKYNHADAEFQQRLQGDTSFGGNLGRAVFQAKKRVLEPLGLVEQAGETAPGKKRPLIESPQQPDSSTGIGKKGKQPAKKKLVFEDGTGAGDGPPEGSTSGAMSDDSEMRAAAGGAAVEGGQGADGVGNASGDWHCDSTWSEGHVTTTSTRTWVLPTYNNHLYKRLGESLQSNTYNGFPTPWGYFDFNRFHCHFSPRDWQRLINNNWGMRPKAMRVKIFNIQVKEVTTSNGETTAANNLTSTVQIFADSSYELPYVMDAGQEGSLPPFPNDVFMVPQYGYCGLVTGNTSQQQTDRNAFYCLEYFPSQMLRTGNNFEITYSFEKVPFHSMYAHSQSLDRLMNPLIDQYLWGLQSTTTGTTLNAGTATTNFTKLRPTNFSNFKKNWLPGPSIKQQGFSKTANQNYKIPATGSDSLIKYETHSTLDGRWSALTPGPPMATAGPADSKFSNSQLIFAGPKQNGNTATVPGTLIFTSEEELAATNATDTDMWGNLPGGDQSNSNLPTVDRLTALGAVPGMVWQNRDIYYQGPIWAKIPHTDGHFHPSPLIGGFGLKHPPPQIFIKNTPVPANPATTFSSTPVNSFITQYSTGQVSVQIDWEIQKERSKRWNPEVQFTSNYGQQNSLLWAPDAAGKYTEPRAIGTRYLTHHL

SEQ ID NO: 770 - DNA, 2205 bp, Artificial Sequence
  Description of Artificial Sequence: Synthetic polynucleotide
atgactgacggttaccttccagattggctagaggacaacctctctgaaggcgttcgagagtggtgggcgctgcaacctggagcccctaaacccaaggcaaatcaacaacatcaggacaacgctcggggtcttgtgcttccgggttacaaatacctcggacccggcaacggactcgacaagggggaacccgtcaacgcagcggacgcggcagccctcgagcacgacaaggcctacgaccagcagctcaaggccggtgacaacccctacctcaagtacaaccacgccgacgcggagttccagcagcggcttcagggcgacacatcgtttgggggcaacctcggcagagcagtcttccaggccaaaaagagggttcttgaacctcttggtctggttgagcaagcgggtgagacggctcctggaaagaagagaccgttgattgaatccccccagcagcccgactcctccacgggtatcggcaaaaaaggcaagcagccggctaaaaagaagctcgttttcgaagacgaaactggagcaggcgacggaccccctgagggatcaacttccggagccatgtctgatgacagtgagatgcgtgcagcagctggcggagctgcagtcgagggcggacaaggtgccgatggagtgggtaatgcctcgggtgattggcattgcgattccacctggtctgagggccacgtcacgaccaccagcaccagaacctgggtcttgcccacctacaacaaccacctctacaagcgactcggagagagcctgcagtccaacacctacaacggattctccaccccctggggatactttgacttcaaccgcttccactgccacttctcaccacgtgactggcagcgactcatcaacaacaactggggcatgcgacccaaagccatgcgggtcaaaatcttcaacatccaggtcaaggaggtcacgacgtcgaacggcgagacaacggtggctaataaccttaccagcacggttcagatctttgcggactcgtcgtacgaactgccgtacgtgatggatgcgggtcaagagggcagcctgcctccttttcccaacgacgtctttatggtgccccagtacggctaccgtggactggtgaccggcaacacttcgcagcaacagactgacagaaatgccttctactgcctggagtactttccttcgcagatgctgcggactggcaacaactttgaaattacgtacagttttgagaaggtgcctttccactcgatgtacgcgcacagccagagcctggaccggctgatgaaccctctcatcgaccagtacctgtggggactgcaatcgaccaccaccggaaccaccctgaatgccgggactgccaccaccaactttaccaagctgcggcctaccaacttttccaactttaaaaagaactggctgcccgggccttcaatcaagcagcagggcttctcaaagactgccaatcaaaactacaagatccctgccaccgggtcagacagtctcatcaaatacgagacgcacagcactctggacggaagatggagtgccctgacccccggacctccaatggccacggctggacctgcggacagcaagttcagcaacagccagctcatctttgcggggcctaaacagaacggcaacacggccaccgtacccgggactctgatcttcacctctgaggaggagctggcagccaccaacgccaccgatacggacatgtggggcaacctacctggcggtgaccagagcaacagcaacctgccgaccgtggacagactgacagccttgggagccgtgcctggaatggtctggcaaaacagagacatttactaccagggtcccatttgggccaagattcctcataccgatggacactttcacccctcaccgctgattggtgggtttgggctgaaacacccgcctcctcaaatttttatcaagaacaccccggtacctgcgaatcctgcgacgaccttcagctctactccggtaaactccttcattactcagtacagcactggccaggtgtcggtgcagattgactgggagatccagaaggagcggtccaaacgctggaaccccgaggtccagtttacctccaactacggacagcaaaactctctgttgtgggctcccgatgcggctgggaaatacactgagcctagggctatcggtacccgctacctcacccaccacctgtaa

SEQ ID NO: 771 - protein, 734 aa, Artificial Sequence
  Description of Artificial Sequence: Synthetic polypeptide
MTDGYLPDWLEDNLSEGVREWWALQPGAPKPKANQQHQDNARGLVLPGYKYLGPGNGLDKGEPVNAADAAALEHDKAYDQQLKAGDNPYLKYNHADAEFQQRLQGDTSFGGNLGRAVFQAKKRVLEPLGLVEQAGETAPGKKRPLIESPQQPDSSTGIGKKGKQPAKKKLVFEDETGAGDGPPEGSTSGAMSDDSEMRAAAGGAAVEGGQGADGVGNASGDWHCDSTWSEGHVTTTSTRTWVLPTYNNHLYKRLGESLQSNTYNGFSTPWGYFDFNRFHCHFSPRDWQRLINNNWGMRPKAMRVKIFNIQVKEVTTSNGETTVANNLTSTVQIFADSSYELPYVMDAGQEGSLPPFPNDVFMVPQYGYRGLVTGNTSQQQTDRNAFYCLEYFPSQMLRTGNNFEITYSFEKVPFHSMYAHSQSLDRLMNPLIDQYLWGLQSTTTGTTLNAGTATTNFTKLRPTNFSNFKKNWLPGPSIKQQGFSKTANQNYKIPATGSDSLIKYETHSTLDGRWSALTPGPPMATAGPADSKFSNSQLIFAGPKQNGNTATVPGTLIFTSEEELAATNATDTDMWGNLPGGDQSNSNLPTVDRLTALGAVPGMVWQNRDIYYQGPIWAKIPHTDGHFHPSPLIGGFGLKHPPPQIFIKNTPVPANPATTFSSTPVNSFITQYSTGQVSVQIDWEIQKERSKRWNPEVQFTSNYGQQNSLLWAPDAAGKYTEPRAIGTRYLTHHL

SEQ ID NO: 772 - DNA, 2205 bp, Artificial Sequence
  Description of Artificial Sequence: Synthetic polynucleotide
atgactgacggttaccttccagattggctagaggacaacctctctgaaggcgttcgagagtggtgggcgctgcaacctggagcccctaaacccaaggcaaatcaacaacatcaggacaacgctcggggtcttgtgcttcagggttacaaatacctcggacccggcaacggactcgacaagggggaacccgtcaacgcagcggacgcggcagccctcgagcacgacaaggcctacgaccagcagctcaaggccggtgacaacccctacctcaagtacaaccacgccgacgcggagttccagcagcggcttcagggcgacacatcgtttgggggcaacctcggcagagcagtcttccaggccaaaaagagggttcttgaaccccttggtctggttgagcaagcgggtgagacggctcctggaaagaagagaccgttgattgaatccccccagcagcccgactcctccacgggtatcggcaaaaaaggcaagcagccggctaaaaagaagctcgttttcgaagacgaaactggagcaggcgacggaccccctgagggatcaacttccggagccatgtctgatgacagtgagatgcgtgcagcagctggcggagctgcagtcgagggcggacaaggtgccgatggagtgggtaatgcctcgggtgattggcattgcgattccacccggtctgagggccacgtcacgaccaccagcaccagaacctgggtcttgcccacctacaacaaccacctctacaagcgactcggagagagcctgcagtccaacacctacaacggattctccaccccctggggatactttgacttcaaccgcttccactgccacttctcaccacgtgactggcagcgactcatcaacaataactggggcatgcgacccaaagccatgcgggtcaaaatcttcaacatccaggtcaaggaggtcacgacgtcgaacggcgagacaacggtggctaataaccttaccagcacggttcagatctttgcggactcgtcgtacgaactgccgtacgtgatggatgcgggtcaagagggcagcctgcctccttttcccaacgacgtctttatggtgccccagtacggctactgtggactggtgaccggcaacacttcgcagcaacagactgacagaaatgccttctactgcctggagtactttccttcgcagatgctgcggactggcaacaactttgaaattacgtacagttttgagaaggtgcctttccactcgatgtacgcgcacagccagagcctggaccggctgatgaaccctctcatcgaccagtacctgtggggactgcaatcgaccaccaccggaaccaccctgaatgccgggactgccaccaccaactttaccaagctgcggcctaccaacttttccaactttaaaaagaactggctgcccgggccttcaatcaagcagcagggcttctcaaagactgccaatcaaaactacaagatccctgccaccgggtcagacagtctcatcaaatacgagacgcacagcactctggacggaagatggagtgcccggacccccggacctccaatggccacggctggacctgcggacagcaagttcagcaacagccagctcatctttgcggggcctaaacagaacggcaacacggccaccgtacccgggactctgatcttcacctctgaggaggagctggcagccaccaacgccaccgatacggacatgtggggcaacctacctggcggtgaccagagcaacagcaacctgccgaccgtggacagactgacagccttgggagccgtgcctggaatggtctggcaaaacagagacatttactaccagggtcccatttgggccaagattcctcataccgatggacactttcacccctcaccgctgattggtgggtttgggctgaaacacccgcctcctcaaatttttatcaagaacaccccggtacctgcgaatcctgcgacgaccttcagctctactccggtaaactccttcattactcagtacagcactggccaggtgtcggtgcagattgactgggagatccagaaggagcggtccaaacgctggaaccccgaggtccagtttacctccaactacggacagcaaaactctctgttgtgggctcccgatgcggctgggaaatacactgagcctagggctatcggtacccgctacctcacccaccacctgtaa

SEQ ID NO: 773 - protein, 734 aa, Artificial Sequence
  Description of Artificial Sequence: Synthetic polypeptide
MTDGYLPDWLEDNLSEGVREWWALQPGAPKPKANQQHQDNARGLVLQGYKYLGPGNGLDKGEPVNAADAAALEHDKAYDQQLKAGDNPYLKYNHADAEFQQRLQGDTSFGGNLGRAVFQAKKRVLEPLGLVEQAGETAPGKKRPLIESPQQPDSSTGIGKKGKQPAKKKLVFEDETGAGDGPPEGSTSGAMSDDSEMRAAAGGAAVEGGQGADGVGNASGDWHCDSTRSEGHVTTTSTRTWVLPTYNNHLYKRLGESLQSNTYNGFSTPWGYFDFNRFHCHFSPRDWQRLINNNWGMRPKAMRVKIFNIQVKEVTTSNGETTVANNLTSTVQIFADSSYELPYVMDAGQEGSLPPFPNDVFMVPQYGYCGLVTGNTSQQQTDRNAFYCLEYFPSQMLRTGNNFEITYSFEKVPFHSMYAHSQSLDRLMNPLIDQYLWGLQSTTTGTTLNAGTATTNFTKLRPTNFSNFKKNWLPGPSIKQQGFSKTANQNYKIPATGSDSLIKYETHSTLDGRWSARTPGPPMATAGPADSKFSNSQLIFAGPKQNGNTATVPGTLIFTSEEELAATNATDTDMWGNLPGGDQSNSNLPTVDRLTALGAVPGMVWQNRDIYYQGPIWAKIPHTDGHFHPSPLIGGFGLKHPPPQIFIKNTPVPANPATTFSSTPVNSFITQYSTGQVSVQIDWEIQKERSKRWNPEVQFTSNYGQQNSLLWAPDAAGKYTEPRAIGTRYLTHHL

SEQ ID NO: 774 - DNA, 2175 bp, Artificial Sequence
  Description of Artificial Sequence: Synthetic polynucleotide
atgtcttttgttgatcaccctccagattggttggaagaagttggtgaaggtcttcgcgagtttttgggccctgaagcgggcccaccgaaaccaaaacccaatcagcagcatcaagatcaagcccgtggtcttgtgctgcctggttataactatctcggacccggaaacggtctcgatcgaggagagcctgtcaacagggcagacgaggtcgcgcgagagcacgacatctcgtacaacgagcagcttgaggcgggagacaacccctacctcaagtacaaccacgcggacgccgagtttcaggagaagctcgccgacgacacatccttcgggggaaacctcggaaaggcagtctttcaggccaagaaaagggttctcgaaccttttggcctggttgaagagggtgctaagacggcccctaccggaaagcggatagacgaccactttccaaaaagaaagaaggtccggaccgaagaggactccaagccttccacctcgtcagacgccgaagctggacccagcggatcccagcagctgcaaatcccagcccaaccagcctcaagtttgggagctgatacaatgtctgcgggaggtggcggcccattgggcgacaataaccaaggtgccgatggagtgggcaatgcctcgggagattggcattgcgattccacgtggatgggggacagagtcgtcaccaagtccacccgaacctgggtgccgcccagctacaacaaccaccagtaccgagagatcaaaagcggctccgtcgacggaagcaacgccaacgcctactttggatacagcaccccctgggggtactttgactttaaccgcttccacagccactggagcccccgagactggcaaagactcatcaacaactactggggcttcagaccccggtccctcagagtcaaaatcttcaacattcaagtcaaagaggtcacggtgcaggactccaccaccaccatcgccaacaacctcacctccaccgtccaagtgtttacggacgacgactaccagctgccctacgtcgtcggcaacgggaccgagggatgcctgccggccttccctccgcaggtctttacgctgccgcagtacggttacgcgacgctgaaccgcgacaacacagaaaatcccaccgagaggagcagcttcttctgcctagagtactttcccagcaagatgctgagaacgggcaacaactttgagtttacctacaactttgaggaggtgcccttccactccagcttcgctcccagtcagaacctcttcaagctggccaacccgctggtggaccagtacttgtaccgcttcgtgagcacaaataacactggcggagtccagttcaacaagaacctggccgggagatacgccaacacctacaaaaactggttcccggggcccatgggccgaacccagggctggaacctgggctccggggtcaaccgcgccagtgtcagcgccttcgccacgaccaataggatggagctcgagggcgcgagttaccaggtgcccccgcagccgaacggcatgaccaacaacctccagggcagcaacacctatgccctggagaacactatgatcttcaacagccagccggcgaacccgggcaccaccgccacgtacctcgagggcaacatgctcatcaccagcgagagcgagacgcagccggtgaaccgcgtggcgtgcaacgtcggcgggcagatggccaccaacaaccagagctccaccactgcccccgcgaccggcacgtacaacctccaggaaatcgtgcccggcagcgtgtggatggagagggacgtgtacctccaaggacccatctgggccaagatcccagagacgggggcgcactttcacccctctccggccatgggcggattcggactcaaacacccaccgcccatgatgctcatcaagaacacgcctgtgcccggaaatatcaccagcttctcggacgtgcccgtcagcagcttcatcacccagtacagcaccgggcaggtcaccgtggagatggagtgggagctcaagaaggaaaactccaagaggtggaacccagagatccagtacacaaacaactacaacgacccccagtttgtggactttgccccggacagcaccggggaatacagaaccaccagacctattggaacccgataccttacccgacccctttaa

SEQ ID NO: 775 - protein, 724 aa, Artificial Sequence
  Description of Artificial Sequence: Synthetic polypeptide
MSFVDHPPDWLEEVGEGLREFLGPEAGPPKPKPNQQHQDQARGLVLPGYNYLGPGNGLDRGEPVNRADEVAREHDISYNEQLEAGDNPYLKYNHADAEFQEKLADDTSFGGNLGKAVFQAKKRVLEPFGLVEEGAKTAPTGKRIDDHFPKRKKVRTEEDSKPSTSSDAEAGPSGSQQLQIPAQPASSLGADTMSAGGGGPLGDNNQGADGVGNASGDWHCDSTWMGDRVVTKSTRTWVPPSYNNHQYREIKSGSVDGSNANAYFGYSTPWGYFDFNRFHSHWSPRDWQRLINNYWGFRPRSLRVKIFNIQVKEVTVQDSTTTIANNLTSTVQVFTDDDYQLPYVVGNGTEGCLPAFPPQVFTLPQYGYATLNRDNTENPTERSSFFCLEYFPSKMLRTGNNFEFTYNFEEVPFHSSFAPSQNLFKLANPLVDQYLYRFVSTNNTGGVQFNKNLAGRYANTYKNWFPGPMGRTQGWNLGSGVNRASVSAFATTNRMELEGASYQVPPQPNGMTNNLQGSNTYALENTMIFNSQPANPGTTATYLEGNMLITSESETQPVNRVACNVGGQMATNNQSSTTAPATGTYNLQEIVPGSVWMERDVYLQGPIWAKIPETGAHFHPSPAMGGFGLKHPPPMMLIKNTPVPGNITSFSDVPVSSFITQYSTGQVTVEMEWELKKENSKRWNPEIQYTNNYNDPQFVDFAPDSTGEYRTTRPIGTRYLTRPL

SEQ ID NO: 776 - DNA, 2175 bp, Artificial Sequence
  Description of Artificial Sequence: Synthetic polynucleotide
atgtcttttgttgatcaccctccagattggttggaagaagttggtgaaggtcttcgcgagtttttgggccttgaagcgggcccaccgaaaccaaaacccaatcagcagcatcaagatcaagcccgtggtcttgtgctgcctggttataactatctcggacccggaaacggtctcgatcgaggagagcctgtcaacagggcagacgaggtcgcgcgagagcacgacatctcgtacaacgagcagcttgaggcgggagacaacccctacctcaagtacaaccacgcggacgccgagtttcaggagaagctcgccgacgacacatccttcgggggaaacctcggaaaggcagtctttcaggccaagaaaagggttctcgaaccttttggcctggttgaagagggtgctaagacggcccctaccggaaagcggatagacgaccactttccaaaaagaaagaaggcccggaccgaagaggactccaagccttccacctcgtcagacgccgaagctggacccagcggatcccagcagctgcaaatcccagcccaaccagcctcaagtttgggagctgatacaatgtctgcgggaggtggcggcccattgggcgacaataaccaaggtgccgatggagtgggcaatgcctcgggagattggcattgcgattccacgtggatgggggacagagtcgtcaccaagtccacccgaacctgggtgctgcccagctacaacaaccaccagtaccgagagatcaaaagcggctccgtcgacggaagcaacgccaacgcctactttggatacagcaccccctgggggtactttgactttaaccgcttccacagccactggagcccccgagactggcaaagactcatcaacaactactggggcttcagaccccggtccctcagagtcaaaatcttcaacattcaagtcaaagaggtcacggtgcaggactccaccaccaccatcgccaacaacctcacctccaccgtccaagtgtttacggacgacgactaccagctgccctacgtcgtcggcaacgggaccgagggatgcctgccggccttccctccgcaggtctttacgctgccgcagtacggttacgcgacgctgaaccgcgacaacaccgaaaatcccaccgagaggagcagcttcttctgcctagagtactttcccagcaagatgctgagaacgggcaacaactttgagtttacctacaactttgaggaggtgcccttccactccagcttcgctcccagtcagaacctcttcaagctggccaacccgctggtggaccagtacttgtaccgcttcgtgagcacaaataacactggcggagtccagttcaacaagaacctggccgggagatacgccaacacctacaaaaactggttcccggggcccatgggccgaacccagggctggaacctgggctccggggtcaaccgcgccagtgtcagcgccttcgccacgaccaataggatggagctcgagggcgcgagttaccaggtgcccccgcagccgaacggcatgaccaacaacctccagggcagcaacacctatgccctggagaacactatgatcttcaacagccagccggcgaacccgggcaccaccgccacgtacctcgagggcaacatgctcatcaccagcgagagcgagacgcagccggtgaaccgcgtggcgtacaacgtcggcgggcagatggccaccaacaaccagagctccaccactgcccccgcgaccggcgcgtacaacctccaggaaatcgtgcccggcagcgtgtggatggagagggacgtgtacctccaaggacccatctgggccaagatcccagagacgggggcgcactttcacccctctccggccatgggcggattcggactcaaacacccaccgcccatgatgctcatcaagaacacgcctgtgcccggaaatatcaccagcttctcggacgtgcccgtcagcagcttcatcacccagtacagcaccgggcaggtcaccgtggagatggagtgggagctcaagaaggaaaactccaagaggtggaacccagagatccagtacacaaacaactacaacgacccccagtttgtggactttgccccggacagcaccggggaatacagaaccaccagacctatcggaacccgataccttacccgacccctttaa

SEQ ID NO: 777 - protein, 724 aa, Artificial Sequence
  Description of Artificial Sequence: Synthetic polypeptide
MSFVDHPPDWLEEVGEGLREFLGLEAGPPKPKPNQQHQDQARGLVLPGYNYLGPGNGLDRGEPVNRADEVAREHDISYNEQLEAGDNPYLKYNHADAEFQEKLADDTSFGGNLGKAVFQAKKRVLEPFGLVEEGAKTAPTGKRIDDHFPKRKKARTEEDSKPSTSSDAEAGPSGSQQLQIPAQPASSLGADTMSAGGGGPLGDNNQGADGVGNASGDWHCDSTWMGDRVVTKSTRTWVLPSYNNHQYREIKSGSVDGSNANAYFGYSTPWGYFDFNRFHSHWSPRDWQRLINNYWGFRPRSLRVKIFNIQVKEVTVQDSTTTIANNLTSTVQVFTDDDYQLPYVVGNGTEGCLPAFPPQVFTLPQYGYATLNRDNTENPTERSSFFCLEYFPSKMLRTGNNFEFTYNFEEVPFHSSFAPSQNLFKLANPLVDQYLYRFVSTNNTGGVQFNKNLAGRYANTYKNWFPGPMGRTQGWNLGSGVNRASVSAFATTNRMELEGASYQVPPQPNGMTNNLQGSNTYALENTMIFNSQPANPGTTATYLEGNMLITSESETQPVNRVAYNVGGQMATNNQSSTTAPATGAYNLQEIVPGSVWMERDVYLQGPIWAKIPETGAHFHPSPAMGGFGLKHPPPMMLIKNTPVPGNITSFSDVPVSSFITQYSTGQVTVEMEWELKKENSKRWNPEIQYTNNYNDPQFVDFAPDSTGEYRTTRPIGTRYLTRPL

SEQ ID NO: 778 - DNA, 2175 bp, Artificial Sequence
  Description of Artificial Sequence: Synthetic polynucleotide
atgtcttttgttgatcaccctccagattggttggaagaagttggtgaaggtcttcgcgagtttttgggccttgaagcgggcccaccgaaaccaaaacccaatcagcagcatcaagatcaagcccgtggtcttgtgctgcctggttataactatctcggacccggaaacggtctcgatcgaggagagcctgtcaacagggcagacggggtcgcgcgagagcacgacatctcgtacaacgagcagcttgaggcgggagacaacccctacctcaagtacaaccacgcggacgccgagtttcaggagaagctcgccgacgacacatccttcgggggaaacctcggaaaggcagtctttcaggccaagaaaagggttctcgaaccttttggcctggttgaagagggtgctaagacggcccctaccggaaagcggatagacgaccactttccaaaaagaaagaaggcccggaccgaagaggactccaagccttccacctcgtcagacgccgaagctggacccagcggatcccagcagctgcaaatcccagcccaaccagcctcaagtttgggagctgatacaatgtctgcgggaggtggcggcccattgggcgacaataaccaaggtgccgatggagtgggcaatgcctcgggagattggcattgcgattccacgtggatgggggacagagtcgtcaccaagtccacccgaacctgggtgctgcccagctacaacaaccaccagtaccgagagatcaaaagcggctccgtcgacggaagcaacgccaacgcctactttggatacagcaccccctgggggtactttgactttaaccgcttccacagccactggagcccccgagactggcaaagactcatcaacaactactggggcttcagaccccggtccctcagagtcaaaatcttcaacattcaagtcaaagaggtcacggtgcaggactccaccaccaccatcgccaacaacctcacctccaccgtccaagcgtttacggacgacgactaccagctgccctacgtcgtcggcaacgggaccgagggatgcctgccggccttccctccgcaggtctttacgctgccgcagtacggttacgcgacgctgaaccgcgacaacacagaaaatcccaccgagaggagcagcttcttctgcctagagtactttcccagcaagatgctgagaacgggcaacaactttgagtttacctacaactttgaggaggtgcccttccactccagcttcgctcccagtcagaacctcttcaagctggccaacccgctggtggaccagtacttgtaccgcttcgtgagcacaaataacactggcggagtccagttcaacaagaacctggccgggagatacgccaacacctacaaaaactggttcccggggcccatgggccgaacccagggctggaacctgggctccggggtcaaccgcgccagtgtcagcgccttcgccacgaccaataggatggagctcgagggcgcgagttaccaggtgcccccgcagccgaacggcatgaccaacaacctccagggcagcaacacctatgccctggagaacactatgatcttcaacagccagccggcgaacccgggcaccaccgccacgtacctcgagggcaacatgctcatcaccagcgagagcgagacgcagccggtgaaccgcgtggcgtacaacgtcggcgggcagatggccaccaacaaccagagctccaccactgcccccgcgaccggcacgtacaacctccaggaaatcgtgcccggcagcgtgtggatggagagggacgtgtacctccaaggacccatctgggccaagatcccagagacgggggcgcactttcacccctctccggccatgggcggattcggactcaaacacccaccgcccatgatgctcatcaagaacacgcctgtgcccggaaatatcaccagcttctcggacgtgcccgtcagcagcttcatcacccagtacagcaccgggcaggtcaccgtggagatggagtgggagctcaagaaggaaaactccaagaggtggaacccagagatccagtacacaaacaactacaacgacccccagtttgtggactttgccccggacagcaccggggaatacagaaccaccagacctatcggaacccgataccttacccgacccctttaa

SEQ ID NO: 779 - protein, 724 aa, Artificial Sequence
  Description of Artificial Sequence: Synthetic polypeptide
MSFVDHPPDWLEEVGEGLREFLGLEAGPPKPKPNQQHQDQARGLVLPGYNYLGPGNGLDRGEPVNRADGVAREHDISYNEQLEAGDNPYLKYNHADAEFQEKLADDTSFGGNLGKAVFQAKKRVLEPFGLVEEGAKTAPTGKRIDDHFPKRKKARTEEDSKPSTSSDAEAGPSGSQQLQIPAQPASSLGADTMSAGGGGPLGDNNQGADGVGNASGDWHCDSTWMGDRVVTKSTRTWVLPSYNNHQYREIKSGSVDGSNANAYFGYSTPWGYFDFNRFHSHWSPRDWQRLINNYWGFRPRSLRVKIFNIQVKEVTVQDSTTTIANNLTSTVQAFTDDDYQLPYVVGNGTEGCLPAFPPQVFTLPQYGYATLNRDNTENPTERSSFFCLEYFPSKMLRTGNNFEFTYNFEEVPFHSSFAPSQNLFKLANPLVDQYLYRFVSTNNTGGVQFNKNLAGRYANTYKNWFPGPMGRTQGWNLGSGVNRASVSAFATTNRMELEGASYQVPPQPNGMTNNLQGSNTYALENTMIFNSQPANPGTTATYLEGNMLITSESETQPVNRVAYNVGGQMATNNQSSTTAPATGTYNLQEIVPGSVWMERDVYLQGPIWAKIPETGAHFHPSPAMGGFGLKHPPPMMLIKNTPVPGNITSFSDVPVSSFITQYSTGQVTVEMEWELKKENSKRWNPEIQYTNNYNDPQFVDFAPDSTGEYRTTRPIGTRYLTRPL

SEQ ID NO: 780 - DNA, 2175 bp, Artificial Sequence
  Description of Artificial Sequence: Synthetic polynucleotide
atgtcttttgttgatcaccctccagattggttggaagaagttggtgaaggtcttcgcgagtttttgggccttgaagcgggcccaccgaaaccaaaacccaatcagcagcatcaagatcaagcccgtggtcttgtgctgcctggttataactatctcggacccggaaacggtctcgatcgaggagagcctgtcaacagggcagacgaggtcgcgcgagagcacgacatctcgtacaacgagcagcttgaggcgggagacaacccctacctcaagtacaaccacgcggacgccgagtttcaggagaagctcgccgacgacacatccttcgggggaaacctcggaaaggcagtctttcaggccaagaaaagggttctcgaaccttttggcctggttgaagagggtgctaagacggcccctaccggaaagcggatagacgaccactttccaaaaagaaagaaggcccggaccgaagaggactccaagccttccacctcgtcagacgccgaagctggacccagcggatcccagcagctgcaaatcccagcccaaccagcctcaagtttgggagctgatacaatgtctgcgggaggtggcggcccattgggcgacaataaccaaggtgccgatggagtgggcaatgcctcgggagattggcattgcgattccacgtggatgggggacagagtcgtcaccaagtccacccgaacctgggtgctgcccagctacaacaaccaccagtaccgagagatcaaaagcggctccgtcgacggaagcaacgccaacgcctactttggatacagcaccccctgggggtactttgactttaaccgcttccacagccactggagcccccgagactggcaaagactcatcaacaactactggggcttcagaccccggtccctcagagtcaaaatcttcaacattcaagtcaaagaggtcacggtgcaggactccaccaccaccatcgccaacaacctcacctccaccgtccaagtgtttacggacgacgactaccagctgccctacgtcgtcggcaacgggaccgagggatgcctgccggccttccctccgcaggtctttacgctgccgcagtacggttacgcgacgctgaaccgcgacaacacagaaaatcccaccgagaggagcagcttcttctgcctagagtactttcccagcaagatgctgagaacgggcaacaactttgagtttacctacaactttgaggaggtgcccttccactccagcttcgctcccagtcagaacctcttcaagctggccaacccgctggtggaccagtacttgtaccgcttcgtgagcacaaataacactggcggagtccagttcaacaagaacctggccgggagatacgccaacacctacaaaaactggttcccggggcccatgggccgaacccagggctggaacctgggctccggggtcaaccgcgccagtgtcagcgccttcgccacgaccaataggatggagctcgagggcgcgagttactaggtgcccccgcagccgaacggcatgaccaacaacctccagggcagcaacacctatgccctggagaacactatgatcttcaacagccagccggcgaacccgggcaccaccgccacgtacctcgagggcaacatgctcatcaccagcgagagcgagacgcagccggtgaaccgcgtggcgtacaacgtcggcgggcagatggccaccaacaaccagagctccaccactgcccccgcgaccggcacgtacaacctccaggaaatcgtgcccggcagcgtgtggatggagggggacgtgtacctccaaggacccatctgggccaagatcccagagacgggggcgcactttcacccctctccggccatgggcggattcggactcaagcacccaccgcccatgatgctcatcaagaacacgcctgtgcccggaaatatcaccagcttctcggacgtgcccgtcagcagcttcatcacccagtacagcaccgggcaggtcaccgtggagatggagtgggagctcaagaaggaaaactccaagaggtggaacccagagatccagtacacaaacaactacaacgacccccagtttgtggactttgccccggacagcaccggggaatacagaaccaccagacctatcggaacccgataccttacccgacccctttaa

SEQ ID NO: 781 - protein, 723 aa, Artificial Sequence
  Description of Artificial Sequence: Synthetic polypeptide
MSFVDHPPDWLEEVGEGLREFLGLEAGPPKPKPNQQHQDQARGLVLPGYNYLGPGNGLDRGEPVNRADEVAREHDISYNEQLEAGDNPYLKYNHADAEFQEKLADDTSFGGNLGKAVFQAKKRVLEPFGLVEEGAKTAPTGKRIDDHFPKRKKARTEEDSKPSTSSDAEAGPSGSQQLQIPAQPASSLGADTMSAGGGGPLGDNNQGADGVGNASGDWHCDSTWMGDRVVTKSTRTWVLPSYNNHQYREIKSGSVDGSNANAYFGYSTPWGYFDFNRFHSHWSPRDWQRLINNYWGFRPRSLRVKIFNIQVKEVTVQDSTTTIANNLTSTVQVFTDDDYQLPYVVGNGTEGCLPAFPPQVFTLPQYGYATLNRDNTENPTERSSFFCLEYFPSKMLRTGNNFEFTYNFEEVPFHSSFAPSQNLFKLANPLVDQYLYRFVSTNNTGGVQFNKNLAGRYANTYKNWFPGPMGRTQGWNLGSGVNRASVSAFATTNRMELEGASYVPPQPNGMTNNLQGSNTYALENTMIFNSQPANPGTTATYLEGNMLITSESETQPVNRVAYNVGGQMATNNQSSTTAPATGTYNLQEIVPGSVWMEGDVYLQGPIWAKIPETGAHFHPSPAMGGFGLKHPPPMMLIKNTPVPGNITSFSDVPVSSFITQYSTGQVTVEMEWELKKENSKRWNPEIQYTNNYNDPQFVDFAPDSTGEYRTTRPIGTRYLTRPL

SEQ ID NO: 782 - DNA, 2175 bp, Artificial Sequence
  Description of Artificial Sequence: Synthetic polynucleotide
atgtcttttgttgatcaccctccagattggttggaagaagttggtgaaggtcttcgcgagtttttgggccttgaagcgggcccaccgaaaccaaaacccaatcagcagcatcaagatcaagcccgtggtcttgtgctgcctggttataactatctcggacccggaaacggtctcgatcgaggagagcctgtcaacagggcagacgaggtcgcgcgagagcacgacatctcgtacaacgagcagcttgaggcgggagacaacccctacctcaagtacaaccacgcggacgccgagtttcaggagaagctcgccgacgacacatccttcgggggaaacctcggaaaggcagtctttcaggccaagaaaagggttctcgaaccttttggcctggttgaagagggtgctaagacggcccctaccggaaagcggatagacgaccactttccaaaaagaaagaaggtccggaccgaagaggactccaagccttccacctcgtcagacgccgaagctggacccagcggatcccagcagctgcaaatcccagcccaaccagcctcaagtttgggagctgatacaatgtctgcgggaggtggcggcccattgggcgacaataaccaaggtgccgatggagtgggcaatgcctcgggagattggcattgcgattccacgtggatgggggacagagtcgtcaccaagtccacccgaacctgggtgctgcccagctacaacaaccaccagtaccgagagatcaaaagcggctccgtcgacggaagcaacgccaacgcctactttggatacagcaccccctgggggtactttgactttaaccgcttccacagccactggagcccccgagactggcaaagactcatcaacaactactggggcttcagaccccggtccctcagagtcaaaatcttcaacattcaagtcaaagaggtcacggtgcaggactccaccaccaccatcgccaacaacctcacctccaccgtccaagtgtttacggacgacgactaccagctgccctacgtcgtcggcaacgggaccgagggatgcctgccggccttccctccgcaggtctttacgctgccgcagtacggttacgcgacgctgaaccgcgacaacacagaaaatcccaccgagaggagcagcttcttctgcctagagtactttcccagcaagatgctgagaacgggcaacaactttgagtttacctacaactttgaggaggtgcccttccactccagcttcgctcccagtcagaacctcttcaagctggccaacccgctggtggaccagtacttgtaccgcttcgtgagcacaaataacactggcggagtccagttcaacaagaacctggccgggagatacgccaacacctacaaaaactggttcccggggcccatgggccgaacccagggctggaacctgggctccggggtcaaccgcgccagtgtcagcgccttcgccacgaccaataggatggagctcgagggcgcgagttaccaggtgcccccgcagccgaacggcatgaccaacaacctccagggcagcaacacctatgccctggagaacactatgatcttcaacagccagccggcgaacccgggcaccaccgccacgtacctcgagggcaacatgctcatcaccagcgagagcgagacgcagccggtgaaccgcgtggcgtacaacgtcggcgggcagatggccaccaacaaccagagctccaccactgcccccgcgaccggcacgtacaacctccaggaaatcgtgcccggcagcgtgtggatggagagggacgtgtacctccaaggacccatctgggccaagatcccagagacgggggcgcactttcacccctctccggccatgggcggattcggactcaaacacccaccgcccatgatgctcatcaagaacacgcctgtgcccggaaatatcaccagcttctcggacgtgcccgtcagcagcttcatcacccagtacagcaccgggcaggtcaccgtggagatggagtgggagctcaagaaggaaaactccgagaggtggaacccagagatccagtacacaaacaactacaacgacccccagtttgtggactttgccccggacagcaccggggaatacagaaccaccagacctattggaacccgataccttacccgacccctttaa

SEQ ID NO: 783 - protein, 724 aa, Artificial Sequence
  Description of Artificial Sequence: Synthetic polypeptide
MSFVDHPPDWLEEVGEGLREFLGLEAGPPKPKPNQQHQDQARGLVLPGYNYLGPGNGLDRGEPVNRADEVAREHDISYNEQLEAGDNPYLKYNHADAEFQEKLADDTSFGGNLGKAVFQAKKRVLEPFGLVEEGAKTAPTGKRIDDHFPKRKKVRTEEDSKPSTSSDAEAGPSGSQQLQIPAQPASSLGADTMSAGGGGPLGDNNQGADGVGNASGDWHCDSTWMGDRVVTKSTRTWVLPSYNNHQYREIKSGSVDGSNANAYFGYSTPWGYFDFNRFHSHWSPRDWQRLINNYWGFRPRSLRVKIFNIQVKEVTVQDSTTTIANNLTSTVQVFTDDDYQLPYVVGNGTEGCLPAFPPQVFTLPQYGYATLNRDNTENPTERSSFFCLEYFPSKMLRTGNNFEFTYNFEEVPFHSSFAPSQNLFKLANPLVDQYLYRFVSTNNTGGVQFNKNLAGRYANTYKNWFPGPMGRTQGWNLGSGVNRASVSAFATTNRMELEGASYQVPPQPNGMTNNLQGSNTYALENTMIFNSQPANPGTTATYLEGNMLITSESETQPVNRVAYNVGGQMATNNQSSTTAPATGTYNLQEIVPGSVWMERDVYLQGPIWAKIPETGAHFHPSPAMGGFGLKHPPPMMLIKNTPVPGNITSFSDVPVSSFITQYSTGQVTVEMEWELKKENSERWNPEIQYTNNYNDPQFVDFAPDSTGEYRTTRPIGTRYLTRPL

SEQ ID NO: 784 - DNA, 2175 bp, Artificial Sequence
  Description of Artificial Sequence: Synthetic polynucleotide
atgtcttttgttgatcaccctccagattggttggaagaagttggtgaaggtcttcgcgagtttttgggccttgaagcgggcccaccgaaaccaaaacccaatcagcagcatcaagatcaagcccgtggtcttgtgctgcctggttataactatctcggacccggaaacggtctcgatcgaggagagcctgtcaacagggcagacgaggtcgcgcgagagcacgacatctcgtacagcgagcagcttgaggcgggagacaacccctacctcaagtacaaccacgcggacgccgagtttcaggagaagctcgccgacgacacatccttcgggggaaacctcggaaaggcagtctttcaggccaagaaaagggttctcgaaccttttggcctggttgaagagggtgctaagacggcccctaccggaaagcggatagacgaccactttccaaaaagaaagaaggcccggaccgaagaggactccaagccttccacctcgtcagacgccgaagctggacccagcggatcccagcagctgcaaatcccagcccaaccagcctcaagtttgggagctgatacaatgtctgcgggaggtggcggcccattgggcgacaataaccaaggtgccgatggagtgggcaatgcctcgggagattggcattgcgattccacgtggatgggggacagagtcgtcaccaagtccacccgaacctgggtgctgcccagctacaacaaccaccagtaccgagagatcaaaagcggctccgtcgacggaagcaacgccaacgcctactttggatacagcaccccctgggggtactttgactttaaccgcttccacagccactggagcccccgagactggcaaagactcatcaacaactactggggcttcagaccccggtccctcagagtcaaaatcttcaacattcaagtcaaagaggtcacggtgcaggactccaccaccaccatcgccaacaacctcacctccaccgtccaagtgtttacggacgacgactaccagctgccctacgtcgtcggcaacgggaccgagggatgcctgccggccttccctccgcaggtctttacgctgccgcagtacggttacgcgacgctgaaccgcgacaacacagaaaatcccaccgagaggagcagcttcttctgcctagagtactttcccagcaagatgctgagaacgggcaacaactttgagtttacctacaactttgaggaggtgcccttccactccagcttcgctcccagtcagaacctcttcaagctggccaacccgctggtggaccagtacttgtaccgcttcgtgagcacaaataacactggcggagtccagttcaacaagaacctggccgggagatacgccaacacctacaaaaactggttcccggggcccatgggccgaacccagggctggaacctgggctccggggtcaaccgcgccagtgtcagcgccttcgccacgaccaataggatggagctcgagggcgcgagttaccaggtgcccccgcagccgaacggcatgaccaacaacctccagggcagcaacacctatgccctggagaacactatgatcttcaacagccagccggcgaacccgggcaccaccgccacgtacctcgagggcaacatgctcatcaccagcgagagcgagacgcagccggtgaaccgcgtggcgtacaacgtcggcgggcagatggccaccaacaaccagagctccaccactgcccccgcgaccggcacgtacaacctccaggaaatcgtgcccggcagcgtgtggatggagagggacgtgtacctccaaggacccatctgggccaagatcccagagacgggggcgcactttcacccctctccggccatgggcggattcggactcaaacacccaccgcccatgatgctcatcaagaacacgcctgtgcccggaaatatcaccagcttctcggacgtgcccgtcagcagcttcatcacccagtacagcaccgggcaggtcaccgtggagatggagtgggagctcaagaaggaaaactccaagaggtggaacccagagatccagtacacaaacaactacaacgacccccagtttgtggactttgccccggacagcaccggggaatacagaaccgccagacctatcggaacccgataccttacccgacccctttaa

SEQ ID NO: 785 - protein, 724 aa, Artificial Sequence
  Description of Artificial Sequence: Synthetic polypeptide
MSFVDHPPDWLEEVGEGLREFLGLEAGPPKPKPNQQHQDQARGLVLPGYNYLGPGNGLDRGEPVNRADEVAREHDISYSEQLEAGDNPYLKYNHADAEFQEKLADDTSFGGNLGKAVFQAKKRVLEPFGLVEEGAKTAPTGKRIDDHFPKRKKARTEEDSKPSTSSDAEAGPSGSQQLQIPAQPASSLGADTMSAGGGGPLGDNNQGADGVGNASGDWHCDSTWMGDRVVTKSTRTWVLPSYNNHQYREIKSGSVDGSNANAYFGYSTPWGYFDFNRFHSHWSPRDWQRLINNYWGFRPRSLRVKIFNIQVKEVTVQDSTTTIANNLTSTVQVFTDDDYQLPYVVGNGTEGCLPAFPPQVFTLPQYGYATLNRDNTENPTERSSFFCLEYFPSKMLRTGNNFEFTYNFEEVPFHSSFAPSQNLFKLANPLVDQYLYRFVSTNNTGGVQFNKNLAGRYANTYKNWFPGPMGRTQGWNLGSGVNRASVSAFATTNRMELEGASYQVPPQPNGMTNNLQGSNTYALENTMIFNSQPANPGTTATYLEGNMLITSESETQPVNRVAYNVGGQMATNNQSSTTAPATGTYNLQEIVPGSVWMERDVYLQGPIWAKIPETGAHFHPSPAMGGFGLKHPPPMMLIKNTPVPGNITSFSDVPVSSFITQYSTGQVTVEMEWELKKENSKRWNPEIQYTNNYNDPQFVDFAPDSTGEYRTARPIGTRYLTRPL

SEQ ID NO: 786 - DNA, 2175 bp, Artificial Sequence
  Description of Artificial Sequence: Synthetic polynucleotide
atgtcttttgttgatcaccctccagattggttggaagaagttggtgaaggtcttcgcgagtttttgggccctgaagcgggcccaccgaaaccaaaacccaatcagcagcatcaagatcaagcccgtggtcttgtgctgcctggttataactatctcggacccggaaacggtctcgatcgaggagagcctgtcaacagggcagacgaggtcgcgcgagagcacgacatctcgtacaacgagcagcttgaggcgggagacaacccctacctcaagtacaaccacgcggacgccgagtttcaggagaagctcgccgacgacacatccttcgggggaaacctcggaaaggcagtctttcaggccaagaaaagggttctcgaaccttttggcctggttgaagagggtgctaagacggcccctaccggaaagcggatagacgaccactttccaaaaagaaagaaggcccggaccgaagaggactccaagccttccacctcgtcagacgccgaagctggacccagcggatcccagcagctgcaaatcccagcccaaccagcctcaagtttgggagctgatacaatgtctgcgggaggtggcggcccattgggcgacaataaccaaggtgccgatggagtgggcaatgcctcgggagattggcattgcgattccacgtggatgggggacagagtcgtcaccaagtccacccgaacctgggtgctgcccagctacaacaaccaccagtaccgagagatcaaaagcggctccgtcgacggaagcaacgccaacgcctactttggatacagcaccccctgggggtactttgactttaaccgcttccacagccactggagcccccgagactggcaaagactcatcaacaactactggggcttcagaccccggtccctcagagtcaaaatcttcaacattcaagtcaaagaggtcacggtgcaggactccaccaccaccatcgccaacaacctcacctccaccgtccaagtgtttacggacgacgactaccagctgccctacgtcgtcggcaacgggaccgagggatgcctgccggccttccctccgcaggtctttacgctgccgcagtacggttacgcgacgctgaaccgcgacaacacagaaaatcccaccgagaggagcagcttcttctgcctagagtactttcccagcaagatgctgagaacgggcaacaactttgagtttacctacaactttgaggaggtgcccttccactccagcttcgctcccagtcagaacctcttcaagctggccaacccgctggtggaccagtacttgtaccgcttcgtgagcacaaataacactggcggagtccagttcaacaagaacctggccgggagatacgccaacacctacaaaaactggttcccggggcccatgggccgaacccagggctggaacctgggctccggggtcaaccgcgccagtgtcagcgccttcgccacgaccaataggatggagctcgagggcgcgagttaccaggtgcccccgcagccgaacggcatgaccaacaacctccagggcagcaacacctatgccctggagaacactatgatcttcaacagccagccggcgaacccgggcaccaccgccacgtacctcgagggcaacatgctcatcaccagcgagagcgagacgcagccggtgaaccgcgtggcgtacaacgtcggcgggcagatgaccaccaacaaccagagctccaccactgcccccgcgaccggcacgtacaacctccaggaaatcgtgcccggcagcgtgtggatggagagggacgtgtacccccaaggacccatctgggccaagatcccagagacgggggcgcactttcacccctctccggccatgggcggattcggactcaaacacccaccgcccatgatgctcatcaagaacacgcctgtgcccggaaatatcaccagcttctcggacgtgcccgtcagcagcttcatcacccagtacagcaccgggcaggtcaccgtggagatggagtgggagctcaagaaggaaaactccaagaggtggaacccagagatccagtacacaaacaactacaacgacccccagtttgtggactttgccccggacagcaccggggaatacaggaccaccagacctatcggaacccgataccttacccgacccctttaa

SEQ ID NO: 787 - protein, 724 aa, Artificial Sequence
  Description of Artificial Sequence: Synthetic polypeptide
MSFVDHPPDWLEEVGEGLREFLGPEAGPPKPKPNQQHQDQARGLVLPGYNYLGPGNGLDRGEPVNRADEVAREHDISYNEQLEAGDNPYLKYNHADAEFQEKLADDTSFGGNLGKAVFQAKKRVLEPFGLVEEGAKTAPTGKRIDDHFPKRKKARTEEDSKPSTSSDAEAGPSGSQQLQIPAQPASSLGADTMSAGGGGPLGDNNQGADGVGNASGDWHCDSTWMGDRVVTKSTRTWVLPSYNNHQYREIKSGSVDGSNANAYFGYSTPWGYFDFNRFHSHWSPRDWQRLINNYWGFRPRSLRVKIFNIQVKEVTVQDSTTTIANNLTSTVQVFTDDDYQLPYVVGNGTEGCLPAFPPQVFTLPQYGYATLNRDNTENPTERSSFFCLEYFPSKMLRTGNNFEFTYNFEEVPFHSSFAPSQNLFKLANPLVDQYLYRFVSTNNTGGVQFNKNLAGRYANTYKNWFPGPMGRTQGWNLGSGVNRASVSAFATTNRMELEGASYQVPPQPNGMTNNLQGSNTYALENTMIFNSQPANPGTTATYLEGNMLITSESETQPVNRVAYNVGGQMTTNNQSSTTAPATGTYNLQEIVPGSVWMERDVYPQGPIWAKIPETGAHFHPSPAMGGFGLKHPPPMMLIKNTPVPGNITSFSDVPVSSFITQYSTGQVTVEMEWELKKENSKRWNPEIQYTNNYNDPQFVDFAPDSTGEYRTTRPIGTRYLTRPL

SEQ ID NO: 788 - DNA, 2175 bp, Artificial Sequence
  Description of Artificial Sequence: Synthetic polynucleotide
atgtcttttgttgatcaccctccagattggttggaagaagttggtgaaggtcttcgcgagtttttgggccttgaagcgggcccaccgaaaccaaaacccaatcagcagcatcaagatcaagcccgtggtcttgtgctgcctggttataactatctcggacccggaaacggtctcgatcgaggagagcctgtcaacagggcagacgaggtcgcgcgagagcacgacatctcgtacaacgagcagcttgaggcgggagacaacccctacctcaagtacaaccacgcggacgccgagtttcaggagaagctcgccgacgacacatccttcgggggaaacctcggaaaggcagtctttcaggccaagaaaagggttctcgaaccttttggcctggttgaagagggtgctaagacggcccctaccggaaagcggatagacgaccactttccaaaaagaaagaaggcccggaccgaagaggactccaagccttccacctcgtcagacgccgaagctggacccagcggatcccagcagctgcaaatcccagcccaaccagcctcaagtttgggagctgatacaatgtctgcgggaggtggcggcccattgggcgacaataaccaaggtgccgatggagtgggcaatgcctcgggagattggcattgcgattccacgtggatgggggacagagtcgtcaccaagtccacccgaacctgggtgctgcccagctacaacaaccaccagtaccgagagatcaaaagcggctccgtcgacggaagcaacgccaacgcctactttggatacagcaccccctgggggtactttgactttaaccgcttccacagccactggagcccccgagactggcaaagactcatcaacaactactggggcttcagaccccggtccctcagagtcaaaatcttcaacattcaagtcaaagaggtcacggtgcaggactccaccaccaccatcgccaacaacctcacctccaccgtccaagtgtttacggacgacgactaccagctgccctacgtcgtcggcaacgggaccgagggatgcctgccggccttccctccgcaggtctttacgctgccgcagtacggttacgcgacgctgaaccgcgacaacacagaaaatcccaccgagaggagcagcttcctctgcctagagtactttcccagcaagatgctgagaacgggcaacaactttgagtttacctacaactttgaggaggtgcccttccactccagcttcgctcccagtcagaacctcttcaagctggccaacccgctggtggaccagtacttgtaccgcttcgtgagcacaaataacactggcggagtccagttcaacaagaacctggccgggagatacgccaacacctacaaaaactggttcccggggcccatgggccgaacccagggctggaacctgggctccggggtcaaccgcgccagtgtcagcgccttcgccacgaccaataggatggagctcgagggcgcgagttaccaggtgcccccgcagccgaacggcatgaccaacaacctccagggcagcaacacctatgccctggagaacactatgatcttcaacagccagccggcgaacccgggcaccaccgccacgtacctcgagggcaacatgctcatcaccagcgagagcgagacgcagccggtgaaccgcgtggcgtacaacgtcggcgggcagatggccaccaacaaccagagctccaccactgcccccgcgaccggcacgtacaacctccaggaaatcgtgcccggcagcgtgtggatgaagagggacgtgtacctccaaggacccatctgggccaagatcccagagacgggggcgcactttcacccctctccggccatgggcggattcggactcaaacacccaccgcccatgatgctcatcaagaacacgcctgtgcccggaaatatcaccagcttctcggacgtgcccgtcagcagcttcatcacccagtacagcaccgggcaggtcaccgtggagatggagtgggagctcaagaaggaaaactccaagaggtggaacccagagatccagtacacaaacaactacaacgacccccagtttgtggactttgccccggacagcaccggggaatacagaaccaccagacctatcggaacccgataccttacccgacccctttaa

SEQ ID NO: 789 - protein, 724 aa, Artificial Sequence
  Description of Artificial Sequence: Synthetic polypeptide
MSFVDHPPDWLEEVGEGLREFLGLEAGPPKPKPNQQHQDQARGLVLPGYNYLGPGNGLDRGEPVNRADEVAREHDISYNEQLEAGDNPYLKYNHADAEFQEKLADDTSFGGNLGKAVFQAKKRVLEPFGLVEEGAKTAPTGKRIDDHFPKRKKARTEEDSKPSTSSDAEAGPSGSQQLQIPAQPASSLGADTMSAGGGGPLGDNNQGADGVGNASGDWHCDSTWMGDRVVTKSTRTWVLPSYNNHQYREIKSGSVDGSNANAYFGYSTPWGYFDFNRFHSHWSPRDWQRLINNYWGFRPRSLRVKIFNIQVKEVTVQDSTTTIANNLTSTVQVFTDDDYQLPYVVGNGTEGCLPAFPPQVFTLPQYGYATLNRDNTENPTERSSFLCLEYFPSKMLRTGNNFEFTYNFEEVPFHSSFAPSQNLFKLANPLVDQYLYRFVSTNNTGGVQFNKNLAGRYANTYKNWFPGPMGRTQGWNLGSGVNRASVSAFATTNRMELEGASYQVPPQPNGMTNNLQGSNTYALENTMIFNSQPANPGTTATYLEGNMLITSESETQPVNRVAYNVGGQMATNNQSSTTAPATGTYNLQEIVPGSVWMKRDVYLQGPIWAKIPETGAHFHPSPAMGGFGLKHPPPMMLIKNTPVPGNITSFSDVPVSSFITQYSTGQVTVEMEWELKKENSKRWNPEIQYTNNYNDPQFVDFAPDSTGEYRTTRPIGTRYLTRPL

SEQ ID NO: 790 - DNA, 2208 bp, Artificial Sequence
  Description of Artificial Sequence: Synthetic polynucleotide
atggctgccgatggttatcttccagattggctcgaggacaaccttagtgaaggaattcgcgagtggtgggctttgaaacctggagcccctcaacccagggcaaatcaacaacatcaagacaacgctcgaggtcttgtgcttccgggttacaaataccttggacccggcaacggactcgacaagggggagccggtcaacgcagccgacgcggcggccctcgagcacgacaaggcctacgaccagcagctcaaggccggagacaacccgtacctcaagtacaaccacgccgacgccgagttccaggagcggctcaaagaagatacgtcttttgggggcaacctcgggcgagcagtcttccaggccaaaaagaggcttcttgaacctcttggtctggttgaggaagcggctaagacggctcctggaaagaagaggcctgtagagcagtctcctcaggaaccggactcctccgcgggtattggcaaatcgggtgcacagcccgctaaaaagagactcaatttcggtcagactggcgacacagagtcagtcccagaccctcaaccaatcggagaacctcccgcagccccctcaggtgtgggatctcttacaatggcttcaggtggtggcgcaccagtggcagacaataacgaaggtgccgatggagtgggtagttcctcgggaaattggcattgcgattcccaatggctgggggacagagtcatcaccaccagcacccgaacctgggccctgcccacctacaacaatcacctctacaagcaaatctccaacagcacatctggaggatcttcaaatgacaacgcctacttcggctacagcaccccctgggggtattttgacttcaacagattccactgccacttctcaccacgtgactggcagcgactcatcaacaacaactggggattccggcctaagcgactcaacttcaagctcttcaacattcaggtcaaagaggttacggacaacaatggagtcaagaccatcgccaataaccttaccagcacggtccaggtcttcacggactcagactgtcagctcccgtacgtgctcgggtcggctcacgagggctgcctcccgccgttcccagcggacgttttcatgattcctcagtacgggtatctgacgcttaatgatggaagccaggccgtgggtcgttcgtccttttactgcctggaatatttcccgtcgcaaatgctaagaacgggtaacaacttccagttcagctacgagtttgagaacgtacctttccatagcagctacgctcacagccaaagcctggaccgactaacgaatccactcatcgaccaatacttgtactatctctcaaagactattaacggttctggacagaatcaacaaacgctaaaattcagtgtggccggacccagcaacatggctgtccagggaagaaactacatacctggacccagctaccgacaacaacgtgtctcaaccactgtgactcaaaacaacaacagcgaatttgcttggcctggagcttcttcttgggctctcaatggacgtaatagcttgatgaatcctggacctgctatggccagccacaaagaaggagaggaccgtttctttcctttgtctggatctttaatttttggcaaacaaggaactggaagagacaacgtggatgcggacaaagtcatgataaccaacgaagaagaaattaaaactactaacccggtagcaacggagtcccatggacaagtggccacaaaccaccagagtgcccaagcacaggcgcagaccggctgggttcaaaaccaaggaatacttccgggtatggtttggcaggacagagatgtgtacctgcaaggacccatttgggccaaaattcctcacacggacggcaactttcacccttctccgctgatgggagggtttggaatgaagcacccgcctcctcagatcctcatcaaaaacacacctgtacctgcggatcctccaacggccttcaacaaggacaagctgaactctttcatcacccagtattctactggccaagtcagcgtggagatcgagtgggagctgcagaaggaaaacagcaagcgctggaacccggagatccagtacacttccaactattacaagtctaataatgttgaatttgctgttaatactgaaggtgtatatagtgaaccccgccccattggcaccagatacctgactcgtaatctg

SEQ ID NO: 791 - protein, 736 aa, Artificial Sequence
  Description of Artificial Sequence: Synthetic polypeptide
MAADGYLPDWLEDNLSEGIREWWALKPGAPQPRANQQHQDNARGLVLPGYKYLGPGNGLDKGEPVNAADAAALEHDKAYDQQLKAGDNPYLKYNHADAEFQERLKEDTSFGGNLGRAVFQAKKRLLEPLGLVEEAAKTAPGKKRPVEQSPQEPDSSAGIGKSGAQPAKKRLNFGQTGDTESVPDPQPIGEPPAAPSGVGSLTMASGGGAPVADNNEGADGVGSSSGNWHCDSQWLGDRVITTSTRTWALPTYNNHLYKQISNSTSGGSSNDNAYFGYSTPWGYFDFNRFHCHFSPRDWQRLINNNWGFRPKRLNFKLFNIQVKEVTDNNGVKTIANNLTSTVQVFTDSDCQLPYVLGSAHEGCLPPFPADVFMIPQYGYLTLNDGSQAVGRSSFYCLEYFPSQMLRTGNNFQFSYEFENVPFHSSYAHSQSLDRLTNPLIDQYLYYLSKTINGSGQNQQTLKFSVAGPSNMAVQGRNYIPGPSYRQQRVSTTVTQNNNSEFAWPGASSWALNGRNSLMNPGPAMASHKEGEDRFFPLSGSLIFGKQGTGRDNVDADKVMITNEEEIKTTNPVATESHGQVATNHQSAQAQAQTGWVQNQGILPGMVWQDRDVYLQGPIWAKIPHTDGNFHPSPLMGGFGMKHPPPQILIKNTPVPADPPTAFNKDKLNSFITQYSTGQVSVEIEWELQKENSKRWNPEIQYTSNYYKSNNVEFAVNTEGVYSEPRPIGTRYLTRNL

SEQ ID NO: 792 - DNA, 2208 bp, Artificial Sequence
  Description of Artificial Sequence: Synthetic polynucleotide
atggctgccgatggttatcttccagattggctcgaggacaaccttagtgaaggaattcgcgagtggtgggctttgaaacctggagcccctcaacccaaggcaaatcaacaacatcaagacaacgctcgaggtcttgtgcttccgggttacaaataccttggacccggcaacggactcgacaagggggagccggtcaacgcagcagacgcggcggccctcgagcacgacaaggcctacgaccagcagctcaaggccggagacaacccgtacctcaagtacaaccacgccgacgccgagttccaggagcggctcaaagaagatacgtcttttgggggcaacctcgggcgagcagtcttccaggccaaaaagaggcttcttgaacctcttggtctggttgaggaagcggctaagacggctcctggaaagaagaggcctgtagagcagtctcctcaggaaccggactcctccgcgggtattggcaaatcgggtgcacagcccgctaagaagagactcaatttcggtcagactggcgacacagagtcagtcccagaccctcaaccaatcggagaacctcccgcagccccctcaggtgtgggatctcttacaatggcttcaggtggtggcgcaccagtggcagacaataacgaaggtgccgatggagtgggtagttcctcgggaaattggcattgcgattcccaatggctgggggacagagtcatcaccaccagcacccgaacctgggccctgcccacctacaacaatcacctctacaagcaaatctccaacagcacatctggaggatcttcaaatgacaacgcctacttcggctacagcaccccctgggggtattttgacttcaacagattccactgccacttctcaccacgtgactggcagcgactcatcaacaacaactggggattccggcctaagcgactcaacttcaagctcttcaacattcaggtcaaagaggttacggacaacaatggagtcaagaccatcgccaataaccttaccagcacggtccaggtcttcacggactcagactatcagctcccgtacgtgctcgggtcggctcacgagggctgcctcccgccgttcccagcggacgttttcatgattcctcagtacgggtatctgacgcttaatgatggaagccaggccgtgggtcgttcgtccttttactgcctggaatatttcccgtcgcaaatgctaagaacgggtaacaacttccagttcagctacgagtttgagaacgtacctttccatagcagctacgctcacagccaaagcctggaccgactaatgaatccacccatcgaccaatacttgtactatctctcaaagactattaacggttctggacagaatcaacaaacgctaaaattcagtgtggccggacccagcaacatggctgtccagggaagaaactacatacctggacccagctaccgacaacaacgtgtctcaaccactgtgactcaaaacaacaacagcgaatttgcttggcctggagcttcttcttgggctctcaatggacgtaatagcttgatgaatcctggacctgctatggccagccacaaagaaggagaggaccgtttctttcctttgtctggatctttaatttttggcaaacaaggaactggaagagacaacgtggatgcggacaaagtcatgataaccaacgaagaagaaattaaaactactaacccggtagcaacggagtcctatggacaagtggccacaaaccaccagagtgcccaagcacaggcgcagaccggctgggttcaaaaccaaggaatacttccgggtatggtttggcaggacagagatgtgtacctgcaaggacccatttgggccaaaattcctcacacggacggcaactttcacccttctccgctgatgggagggtttggaatgaagcacccgcctcctcagatcctcatcaaaaacacacctgtacctgcggatcctccaacggccttcaacaaggacaagctgaactctttcatcacccagtattctactggccaagtcagcgtggagatcgagtgggagctgcagaaggaaaacagcaagcgctggaacccggagatccagtacacttccaactattacaagtctaataatgttgaatttgctgttaatactgaaggtgtatatggtgaaccccgccccattggcaccagatacctgactcgtaatctg

SEQ ID NO: 793 - protein, 736 aa, Artificial Sequence
  Description of Artificial Sequence: Synthetic polypeptide
MAADGYLPDWLEDNLSEGIREWWALKPGAPQPKANQQHQDNARGLVLPGYKYLGPGNGLDKGEPVNAADAAALEHDKAYDQQLKAGDNPYLKYNHADAEFQERLKEDTSFGGNLGRAVFQAKKRLLEPLGLVEEAAKTAPGKKRPVEQSPQEPDSSAGIGKSGAQPAKKRLNFGQTGDTESVPDPQPIGEPPAAPSGVGSLTMASGGGAPVADNNEGADGVGSSSGNWHCDSQWLGDRVITTSTRTWALPTYNNHLYKQISNSTSGGSSNDNAYFGYSTPWGYFDFNRFHCHFSPRDWQRLINNNWGFRPKRLNFKLFNIQVKEVTDNNGVKTIANNLTSTVQVFTDSDYQLPYVLGSAHEGCLPPFPADVFMIPQYGYLTLNDGSQAVGRSSFYCLEYFPSQMLRTGNNFQFSYEFENVPFHSSYAHSQSLDRLMNPPIDQYLYYLSKTINGSGQNQQTLKFSVAGPSNMAVQGRNYIPGPSYRQQRVSTTVTQNNNSEFAWPGASSWALNGRNSLMNPGPAMASHKEGEDRFFPLSGSLIFGKQGTGRDNVDADKVMITNEEEIKTTNPVATESYGQVATNHQSAQAQAQTGWVQNQGILPGMVWQDRDVYLQGPIWAKIPHTDGNFHPSPLMGGFGMKHPPPQILIKNTPVPADPPTAFNKDKLNSFITQYSTGQVSVEIEWELQKENSKRWNPEIQYTSNYYKSNNVEFAVNTEGVYGEPRPIGTRYLTRNL

SEQ ID NO: 794 - DNA, 2208 bp, Artificial Sequence
  Description of Artificial Sequence: Synthetic polynucleotide
atggctgccgatggttatcttccagattggctcgaggacaaccttagtgaaggaattcgcgagtggtgggctttgaaacctggagcccctcaacccaaggcaaatcaacaacatcaagacaacgctcgaggtcttgtgcttccgggttacaaataccttggacccggcaacggactcgacaagggggagccggtcaacgcagcagacgcggcggccctcgagcacgacaaggcctacgaccagcagctcaaggccggagacaacccgtacctcaagtacaaccacgccgacgccgagttccaggagcggctcaaagaagatacgtcttttgggggcaacctcgggcgagcagtcttccaggccaaaaagaggcttcttgaacctcttggtctggttgaggaagcggctaagacggctcctggaaagaagaggcctgtagagcagtctcctcaggaaccggactcctccgcgggtattggcaaatcgggtgcacagcccgctaaaaagagactcaatttcggtcagactggcgacacagagtcagtcccagaccctcaaccaatcggagaacctcccgcagccccctcaggtgtgggatctcttacaatggcttcaggtggtggcgcaccagtggcagacaataacgaaggtgccgatggagtgggtagttcctcgggaaattggcattgcgattcccaatggctgggggacagagtcatcaccaccagcacccgaacctgggccctgcccacctacaacaatcacctctacaagcaaatctccaacagcacatctggaggatcttcaaatgacaacgcctacttcggctacagcaccccctgggggtattttgacttcaacagattccactgccacttctcaccacgtgaccggcagcgactcatcaacaacaactggggattccggcctaagcgactcaacttcaagctcttcaacattcaggtcaaagaggttacggacaacaatggagtcaagaccatcgccaataaccttaccagcacggtccaggtcttcacggactcagactatcagctcccgtacgtgctcgggtcggctcacgagggctgcctcccgccgttcccagcggacgttttcatgattcctcagtacgggtatctgacgcttaatgatggaagccaggccgtgggtcgttcgtccttttactgcctggaatatttcccgtcgcaaatgctaagaacgggtaacaacttccagttcagctacgagtttgagaacgtacctttccatagcagctacgctcacagccaaagcctggaccgactaatgaatccactcatcgaccaatacttgtactatctctcaaagactattaacggttctggacagaatcaacaaacgctaaaattcagtgtggccggacccagcaacatggctgtccagggaagaaactacatacctggacccagctaccgacaacaacgtgtctcaaccactgtgactcaaaacaacaacagcgaatttgcttggcctggagcttcttcttgggctctcaatggacgtaatagcttgatgaatcctggacctgctatggccagccacaaagaaggagaggaccgtttctttcctttgtctggatctttaatttttggcaaacaaggaactggaagagacaacgtggatgcggacaaagtcatgataaccaacgaagaagaaattaaaactactaacccggtagcaacggagtcctatggacaagtggccacaaaccaccagagtgcccaagcacaggcgcagaccggctgggttcaaaaccaaggaatacttccgggtatggtttggcaggacagagatgtgtacctgcaaggacccatttgggccaaaattcctcacacggacggcaactttcacccttctccgctgatgggagggtttggaatgaagcacccgcctcctcagatcctcatcaaaaacacacctgtacctgcggatcctccaacggccttcaacaaggacaagctgaactctttcatcacccagtattctactggccaagtcagcgtggagatcgagtgggagctgcagaaggaaaacagcaagcgctggaacccggagatccagtacacttccaactattacaagtctaataatgttgaatttgctgttaatactgaaggtgtatatagtgaaccccgccccattggcaccagatacctgactcgtaatctg

SEQ ID NO: 795 - protein, 736 aa, Artificial Sequence
  Description of Artificial Sequence: Synthetic polypeptide
MAADGYLPDWLEDNLSEGIREWWALKPGAPQPKANQQHQDNARGLVLPGYKYLGPGNGLDKGEPVNAADAAALEHDKAYDQQLKAGDNPYLKYNHADAEFQERLKEDTSFGGNLGRAVFQAKKRLLEPLGLVEEAAKTAPGKKRPVEQSPQEPDSSAGIGKSGAQPAKKRLNFGQTGDTESVPDPQPIGEPPAAPSGVGSLTMASGGGAPVADNNEGADGVGSSSGNWHCDSQWLGDRVITTSTRTWALPTYNNHLYKQISNSTSGGSSNDNAYFGYSTPWGYFDFNRFHCHFSPRDRQRLINNNWGFRPKRLNFKLFNIQVKEVTDNNGVKTIANNLTSTVQVFTDSDYQLPYVLGSAHEGCLPPFPADVFMIPQYGYLTLNDGSQAVGRSSFYCLEYFPSQMLRTGNNFQFSYEFENVPFHSSYAHSQSLDRLMNPLIDQYLYYLSKTINGSGQNQQTLKFSVAGPSNMAVQGRNYIPGPSYRQQRVSTTVTQNNNSEFAWPGASSWALNGRNSLMNPGPAMASHKEGEDRFFPLSGSLIFGKQGTGRDNVDADKVMITNEEEIKTTNPVATESYGQVATNHQSAQAQAQTGWVQNQGILPGMVWQDRDVYLQGPIWAKIPHTDGNFHPSPLMGGFGMKHPPPQILIKNTPVPADPPTAFNKDKLNSFITQYSTGQVSVEIEWELQKENSKRWNPEIQYTSNYYKSNNVEFAVNTEGVYSEPRPIGTRYLTRNL

SEQ ID NO: 796 - DNA, 2208 bp, Artificial Sequence
  Description of Artificial Sequence: Synthetic polynucleotide
atggctgccgatggttatcttccagattggctcgaggacaaccttagtgaaggaattcgcgagtggtgggctttgaaacctggagcccctcaacccaaggcaaatcaacaacatcaagacaacgctcgaggtcttgtgcttccgggttacaaataccttggacccggcaacggactcgacaagggggagccggtcaacgcagcagacgcggcagccctcgagcacgacaaggcctacgaccagcagctcaaggccggagacaacccgtacctcaagtacaaccacgccgacgccgagttccaggagcggctcaaagaagatacgtcttttgggggcaacctcgggcgagcagtcttccaggccaaaaagaggcttcttgaacctcttggtctggttgaggaagcggctaagacggctcctggaaagaagaggcctgtagagcagtctcctcaggaaccggactcctccgcgggtattggcaaatcgggtgcacagcccgctaaaaagagactcaatttcggtcagactggcgacacagagtcagtcccagaccctcaaccaatcggagaacctcccgcagccccctcaggtgtgggatctcttacaatggcttcaggtggtggcgcaccagtggcagacaataacgaaggtgccgatggagtgggtagttcctcgggaaattggcattgcaattcccaatggctgggggacagagtcatcaccaccagcacccgaacctgggccctgcccacctacaacaatcacctctacaagcaaatctccaacagcacatctggaggatcttcaaatgacaacgcctacttcggctacagcaccccctgggggtattttgacttcaacagattccactgccacttctcaccacgtgactggcagcgactcatcaacaacaactggggattccggcctaagcgactcaacttcaagctcttcaacattcaggtcaaagaggttacggacaacaatggagtcaagaccatcgccaataaccttaccagcacggtccaggtcttcacggactcagactatcagctcccgtacgtgctcgggtcggctcacgagggctgcctcccgccgttcccagcggacgttttcatgattcctcagtacgggtatctgacgcttaatgatggaagccaggccgtgggtcgttcgtccttttactgcctggaatatttcccgtcgcaaatgctaagaacgggtaacaacttccagttcagctacgagtttgagaacgtacctttccatagcagctacgctcacagccaaagcctggaccgactaatgaatccactcatcgaccaatacttgtactatctctcaaagactattaacggttctggacagaatcaacaaacgctaaaattcagtgtggccggacccggcaacatggctgtccagggaagaaactacatacctggacccagctaccgacaacaacgtgtctcaaccactgtgactcaaaacaacaacagcgaatttgcttggcctggagcttcttcttgggctctcaatggacgtaatagcttgatgaatcctggacctgctatggccagccacaaagaaggagaggaccgtttctttcctttgtctggatctttaatttttggcaaacaaggaactggaagagacaacgtggatgcggacaaagtcatgataaccaacgaagaagaaattaaaactactaacccggtagcaacggagtcctatggacaagtggccacaaaccaccagagtgcccaagcacaggcgcagaccggctgggttcaaaaccaaggaatacttccgggtatggtttggcaggacagagatgtgtacctgcaaggacccatttgggccaaaattcctcacacggacggcaactttcacccttctccgctgatgggagggtttggaatgaagcacccgcctcctcagatcctcatcaagaacacacctgtacctgcggatcctccaacggccttcaacaaggacaagctgaactctttcatcacccagtattctactggccaagtcagcgtggagatcgagtgggagctgcagaaggaaaacagcaagcgctggaacccggagatccagtacacttccaactattacaagtctaataatgttgaatttgctgttaatactgaaggtgtatatagtgaaccccgccccattggcaccagatacctgactcgtaatctg

SEQ ID NO: 797 - protein, 736 aa, Artificial Sequence
  Description of Artificial Sequence: Synthetic polypeptide
MAADGYLPDWLEDNLSEGIREWWALKPGAPQPKANQQHQDNARGLVLPGYKYLGPGNGLDKGEPVNAADAAALEHDKAYDQQLKAGDNPYLKYNHADAEFQERLKEDTSFGGNLGRAVFQAKKRLLEPLGLVEEAAKTAPGKKRPVEQSPQEPDSSAGIGKSGAQPAKKRLNFGQTGDTESVPDPQPIGEPPAAPSGVGSLTMASGGGAPVADNNEGADGVGSSSGNWHCNSQWLGDRVITTSTRTWALPTYNNHLYKQISNSTSGGSSNDNAYFGYSTPWGYFDFNRFHCHFSPRDWQRLINNNWGFRPKRLNFKLFNIQVKEVTDNNGVKTIANNLTSTVQVFTDSDYQLPYVLGSAHEGCLPPFPADVFMIPQYGYLTLNDGSQAVGRSSFYCLEYFPSQMLRTGNNFQFSYEFENVPFHSSYAHSQSLDRLMNPLIDQYLYYLSKTINGSGQNQQTLKFSVAGPGNMAVQGRNYIPGPSYRQQRVSTTVTQNNNSEFAWPGASSWALNGRNSLMNPGPAMASHKEGEDRFFPLSGSLIFGKQGTGRDNVDADKVMITNEEEIKTTNPVATESYGQVATNHQSAQAQAQTGWVQNQGILPGMVWQDRDVYLQGPIWAKIPHTDGNFHPSPLMGGFGMKHPPPQILIKNTPVPADPPTAFNKDKLNSFITQYSTGQVSVEIEWELQKENSKRWNPEIQYTSNYYKSNNVEFAVNTEGVYSEPRPIGTRYLTRNL

SEQ ID NO: 798 - DNA, 2208 bp, Artificial Sequence
  Description of Artificial Sequence: Synthetic polynucleotide
atggctgccgatggttatcttccagattggctcgaggacaaccttagtgaaggaattcgcgagtggtgggctttgaaacctggagcccctcaacccaaggcaaatcaacaacatcaagacaacgctcgaggtcttgtgcttccgggttacagataccttggacccggcaacggactcgacaagggggagccggtcaacgcagcagacgcggcggccctcgagcacgacaaggcctacgaccagcagctcaaggccggagacaacccgtacctcaagtacaaccacgccgacgccgagttccaggagcggctcaaagaagatacgtcttttgggggtaacctcgggcgagcagtcttccaggccaaaaagaggcttcttgaacctcttggtctggttgaggaagcggctaagacggctcctggaaagaagaggcctgtagagcagtctcctcaggaaccggactcctccgcgggtatcggcaaatcgggtgcacagcccgctaaaaagagactcaatttcggtcagactggcgacacagagtcagtcccagaccctcaaccaatcggagaacctcccgcagccccctcaggtgtgggatctcttacaatggcttcaggtggtggcgcaccagtggcagacaataacgaaggtgccgatggagtgggtagttcctcgggaaattggcattgcgattcccaatggctgggggacagagtcatcaccaccagcacccgaacctgggccctgcccacctacaacaatcacctctacaagcaaatctccaacagcacatctggaggatcttcaaatgacaacgcctacttcggctacagcaccccctgggggtattttgacttcaacagattccactgccacttctcaccacgtgactggcagcgactcatcaacaacaactggggattccggcctaagcgactcaacttcaagctcttcaacattcaggtcaaagaggttacggacaacaatggagtcaagaccgtcgccaataaccttaccagcacggtccaggtcttcacggactcagactatcagctcccgtacgtgctcgggtcggctcacgagggctgcctcccgccgttcccagcggacgttttcatgattcctcagtacgggtatctgacgcttaatgatggaagccaggccgtgggtcgttcgtccttttactgcctggaatatttcccgtcgcaaatgctaagaacgggtaacaacttccagttcagctacgagtttgagaacgtacctttccatagcagctacgctcacagccaaagcctggaccgactaatgaatccactcatcgaccaatacttgtactatctctcaaagactattaacggttctggacagaatcaacaaacgctaaaattcagtgtggccggacccagcaacatggctgtccagggaagaaactacatacctggacccagctaccgacaacaacgtgtctcaaccactgtgactcaaaacaacaacagcgaatttgcttggcctggagcttcttcttgggctctcaatggacgtaatagcttgatgaatcctggacctgctatggccagccacaaagaaggagaggaccgtttctttcctttgtctggatctttaatttttggcaaacaaggaactggaagagacaacgtggatgcggacaaagtcatgataaccaacgaagaagaaattaaaactactaacccggtagcaacggagtcctatggacaagtggccacaaaccaccagagtgcccaagcacaggcgcagaccggctgggttcaaaaccaaggaatacttccgggtatggtttggcaggacagagatgtgtacctgcaaggacccatttgggccaaaattcctcacacggacggcaactttcacccttctccgctgatgggagggtttggaatgaagcacccgcctcctcagatcctcatcaaaaacacacctgtacctgcggatcctccaacggccttcaacaaggacaagctgaactctttcatcacccagtattctactggccaagtcagcgtggagatcgagtgggagctgcagaaggaaaacagcaagcgctggaacccggagatccagtacacttccaactattacaagtctaataatgttgaatttgctgttaatactgaaggtgtatatagtggaccccgccccattggcaccagatacctgactcgtaatctg

SEQ ID NO: 799 - protein, 736 aa, Artificial Sequence
  Description of Artificial Sequence: Synthetic polypeptide
MAADGYLPDWLEDNLSEGIREWWALKPGAPQPKANQQHQDNARGLVLPGYRYLGPGNGLDKGEPVNAADAAALEHDKAYDQQLKAGDNPYLKYNHADAEFQERLKEDTSFGGNLGRAVFQAKKRLLEPLGLVEEAAKTAPGKKRPVEQSPQEPDSSAGIGKSGAQPAKKRLNFGQTGDTESVPDPQPIGEPPAAPSGVGSLTMASGGGAPVADNNEGADGVGSSSGNWHCDSQWLGDRVITTSTRTWALPTYNNHLYKQISNSTSGGSSNDNAYFGYSTPWGYFDFNRFHCHFSPRDWQRLINNNWGFRPKRLNFKLFNIQVKEVTDNNGVKTVANNLTSTVQVFTDSDYQLPYVLGSAHEGCLPPFPADVFMIPQYGYLTLNDGSQAVGRSSFYCLEYFPSQMLRTGNNFQFSYEFENVPFHSSYAHSQSLDRLMNPLIDQYLYYLSKTINGSGQNQQTLKFSVAGPSNMAVQGRNYIPGPSYRQQRVSTTVTQNNNSEFAWPGASSWALNGRNSLMNPGPAMASHKEGEDRFFPLSGSLIFGKQGTGRDNVDADKVMITNEEEIKTTNPVATESYGQVATNHQSAQAQAQTGWVQNQGILPGMVWQDRDVYLQGPIWAKIPHTDGNFHPSPLMGGFGMKHPPPQILIKNTPVPADPPTAFNKDKLNSFITQYSTGQVSVEIEWELQKENSKRWNPEIQYTSNYYKSNNVEFAVNTEGVYSGPRPIGTRYLTRNL

SEQ ID NO: 800 - DNA, 2208 bp, Artificial Sequence
  Description of Artificial Sequence: Synthetic polynucleotide
atggctgccgatggttatcttccagattggctcgaggacaaccttagtgaaggaattcgcgagtggtgggctttgaaacctggagcccctcaacccaaggcaaatcaacaacatcaagacaacgctcgaggtcttgtgcttccgggttacaaataccttggacccggcaacggactcgacaagggggagccggtcaacgcagcagacgcggcggccctcgagcacgacaaggcctacgaccagcagctcaaggccggagacaacccgtacctcaagtacaaccacgccgacgccgagttccaggagcggctcaaagaagatacgtcttttgggggcaacctcgggcgagcagtcttccaggccaaaaagaggcttcttgaacctcttggtctggttgaggaagcggctaagacggctcctggaaagaagaggcctgtagagcagtctcctcaggaaccggactcctccgcgggtattggcaaatcgggtgcacagcccgctaaaaagagactcaatttcggtcagactggcgacacagagtcagtcccagaccctcaaccaatcggagaacctcccgcagccccctcaggtgtgggatctcttacaatggcttcaggtggtggcgcaccagtggcagacaataacgaaggtgccgatggagtgggtagttcctcgggaaattggcattgcgattcccaatggctgggggacagagtcatcaccaccagcacccgaacctgggccctgcccacctacaacaatcacctctacaagcaaatctccaacagcacatctggaggatcttcaaatgacaacgcctacttcggctacagcaccccctgggggtattttgacttcaacagattccactgccacttctcaccacgtgactggcagcgactcatcaacaacaactggggattccggcctaagcgactcaacttcaagctcttcaacattcaggtcaaagaggttacggacaacaatggagtcaagaccatcgccaataaccttaccagcacggtccaggtcttcacggactcagactatcagctcccgtacgtgctcgggtcggctcacgagggctgcctcccgccgttcccagcggacgttttcatgattcctcagtacgggtatctgacgcttaatgatggaagccaggccgtgggtcgttcgtccttttactgcctggaatatttcccgtcgcaaatgctaagaacgggtaacaacttccagttcagctacgagtttgagaacgtacctttccatagcagctacgctcacagccaaagcctggaccgactaatgaatccactcatcgaccaatacttgtactatctctcaaagactattaacggttctggacagaatcaacaaacgctaaaattcagtgtggccggacccagcaacatggctgtccagggaagaaactacatacctggacccagctaccgacaacaacgtgtctcaaccactgtgactcaaaacaacaacagcgaatttgcttggcctggagcttcttcttgggctctcaatggacgtaatagcttgatgaatcctggacctgctatggccagccacaaagaaggagaggaccgtttctttcctttgtctggatctttaatttttggcaaacaaggaactggaagagacaacgtggatgcggacaaagtcatgataaccaacgaagaagaaattaaaactactaacccggtagcaacggagtcctatggacaagtggccacaaaccaccagagtgcccaagcacaggcgcagaccggctgggttcaaaaccaaggaatacttccgggtatggtttggcaggacagagatgtgtacctgcaaggacccatttgggccaaaattcctcacacggacggcaactttcacccttctccgctgatgggagggtttggaatgaagcacccgcctcctcagatcctcatcaaaaacacacctgtacctgcggatcctccaacggccttcaacaaggacaagctgaactctttcatcacccagtattctactggccaagtcagcgtggagatcgagtgggagctgcagaaggaaaacagcaagcgctggaacccggagatccagtacacttccaactattacaagtctaataatgttgaatttgctgttaatactgaaggtgtatatagtgaaccccgccccattggcaccagatacctgactcgtaatctg

SEQ ID NO: 801 - protein, 736 aa, Artificial Sequence; identical to SEQ ID NO: 147
  Description of Artificial Sequence: Synthetic polypeptide

SEQ ID NO: 802 - DNA, 2208 bp, Artificial Sequence
  Description of Artificial Sequence: Synthetic polynucleotide
atggctgccgatggttatcttccagattggctcgaggacaaccttagtgaaggaattcgcgagtggtgggctttgaaacctggagcccctcaacccaaggcaaatcaacaacgtcaagacaacgctcgaggtcttgtgcttccgggttacaaataccttggacccggcaacggactcgacaagggggagccggtcaacgcagcagacgcggcggccctcgagcacgacaaggcctacgaccagcagctcaaggccggaggcaacccgtgcctcaagtacaaccacgccgacgccgagttccaggagcggctcaaagaagatacgtcttttgggggcaacctcgggcgagcagtcttccaggccaaaaagaggcttcttgaacctcttggtctggttgaggaagcggctaagacggctcctggaaagaagaggcctgtagagcagtctcctcaggaaccggactcctccgcgggtattggcagatcgggtgcacagcccgctaaaaagagactcaatttcggtcagactggcgacacagagtcagtcccagaccctcaaccaatcggagaacctcccgcagccccctcaggtgtgggatctcttacaatggcttcaggtggtggcgcaccagtggcagacaataacgaaggtgccgatggagtgggtagttcctcgggaaattggcattgcgattcccaatggctgggggacagagtcatcaccaccagcacccgaacctgggccctgcccacctacaacaatcacctctacaagcaaatctccaacagcacatctggaggatcttcaaatgacaacgcctacttcggctacagcaccccctgggggtattttgacttcaacagattccactgccacttctcaccacgtgactggcagcgactcatcaacaacaactggggattccggcctaagcgactcaacttcaagctcttcaacattcaggtcaaagaggttacggacaacaatggagtcaaggccatcgccaataaccttaccagcacggtccaggtcttcacggactcagactatcagctcccgtacgtgctcgggtcggctcacgagggctgcctcccgccgttcccagcggacgttttcatgattcctcagtacgggtatctgacgcttaatgatggaagccaggccgtgggtcgttcgtccttttactgcctggaatatttcccgtcgcaaatgctaagaacgggtaacaacttccagttcagctacgagtttgagaacgtacctttccatagcagctacgctcacagccaaagcctggaccgactaatgaatccactcatcgaccaatacttgtactatctctcaaagactattgacggttctggacagaatcaacaaacgctaaaattcagtgtggccggacccagcaacatggctgtccagggaagaaactacatacctggacccagctaccgacaacaacgtgtctcaaccactgtgactcaaaacaacaacagcgaatttgcttggcctggagcttcttcttgggctctcaatggacgtaatagcttgatggatcctggacctgctatggccagccacaaagaaggagaggaccgtttctttcctttgtctggatctttaatttttggcaaacaaggaactggaagagacaacgtggatgcggacaaagtcatgataaccaacgaagaagaaattaaaactactaacccggtagcaacggagtcctatggacaagtggccacaaaccaccagagtgcccaagcacaggcgcagaccggctgggttcaaaaccaaggaatacttccgggtatggtttggcaggacagagatgtgtacctgcaaggacccatttgggccaaaattcctcacacgggcggcaactttcacccttctccgctgatgggagggtttggaatgaagcacccgcctcctcagatcctcatcaaaaacacacctgtacctgcggatcctccaacggccttcaacaaggacaagctgaactctttcatcacccagtattctactggccaagtcagcgtggagatcgagtgggagctgcagaaggaaaacagcaagcgctggaacccggagatccagtacacttccaactattacaagtctaataatgttgaatttgctgttaatactgaaggtgtatatagtgaaccccgccccattggcaccagatacctgactcgtaatctg

SEQ ID NO: 803 - protein, 736 aa, Artificial Sequence
  Description of Artificial Sequence: Synthetic polypeptide
MAADGYLPDWLEDNLSEGIREWWALKPGAPQPKANQQRQDNARGLVLPGYKYLGPGNGLDKGEPVNAADAAALEHDKAYDQQLKAGGNPCLKYNHADAEFQERLKEDTSFGGNLGRAVFQAKKRLLEPLGLVEEAAKTAPGKKRPVEQSPQEPDSSAGIGRSGAQPAKKRLNFGQTGDTESVPDPQPIGEPPAAPSGVGSLTMASGGGAPVADNNEGADGVGSSSGNWHCDSQWLGDRVITTSTRTWALPTYNNHLYKQISNSTSGGSSNDNAYFGYSTPWGYFDFNRFHCHFSPRDWQRLINNNWGFRPKRLNFKLFNIQVKEVTDNNGVKAIANNLTSTVQVFTDSDYQLPYVLGSAHEGCLPPFPADVFMIPQYGYLTLNDGSQAVGRSSFYCLEYFPSQMLRTGNNFQFSYEFENVPFHSSYAHSQSLDRLMNPLIDQYLYYLSKTIDGSGQNQQTLKFSVAGPSNMAVQGRNYIPGPSYRQQRVSTTVTQNNNSEFAWPGASSWALNGRNSLMDPGPAMASHKEGEDRFFPLSGSLIFGKQGTGRDNVDADKVMITNEEEIKTTNPVATESYGQVATNHQSAQAQAQTGWVQNQGILPGMVWQDRDVYLQGPIWAKIPHTGGNFHPSPLMGGFGMKHPPPQILIKNTPVPADPPTAFNKDKLNSFITQYSTGQVSVEIEWELQKENSKRWNPEIQYTSNYYKSNNVEFAVNTEGVYSEPRPIGTRYLTRNL

SEQ ID NO: 804 - DNA, 2208 bp, Artificial Sequence
  Description of Artificial Sequence: Synthetic polynucleotide
atggctgccgatggttatcttccagattggctcgaggacaaccttagtgaaggaattcgcgagtggtgggctttgaaacctggagcccctcaacccaaggcaaatcaacaacatcaagacaacgctcgaggtcttgtgcttccgggttacaaataccttggacccggcaacggactcgacaagggggagccggtcaacgcagcagacgcggcggccctcgagcacgacaaggcctacgaccagcagctcaaggccggagacaacccgtacctcaagtacaaccacgccgacgccgagttccaggagcggctcaaagaagatacgtcttttgggggcaacctcgggcgagcagtcttccaggccaaaaagaggcttcttgaacctcttggtctggttgaggaagcggctaagacggctcctggaaagaagaggcctgtagagcagtctcctcaggaaccggactcctccgcgggtattggcaaatcgggtgcacagcccgctaaaaagagactcaatttcggtcagactggcgacacagagtcagtcccagaccctcaaccaatcggagaacctcccgcagccccctcaggtgtgggatctcttacaatggcttcaggtggtggcgcaccagtggcagacaataacgaaggtgccgatggagtgggtagttcctcgggaaattggcattgcgattcccaatggctgggggacagagtcatcaccaccagcacccgaacctgggccctgcccacctacaacaatcacctctacaagcaaatctccaacagcacatctggaggatcttcaaatgacaacgcctacttcggctacagcaccccctgggggtattttgacttcaacagattccactgccacttctcaccacgtgactggcagcgactcatcaacaacaactggggattccggcctaagcgactcaacttcaagctcttcaacattcaggtcaaagaggttacggacaacaatggagtcaagaccatcgccaataaccttaccagcacggtccaggtcttcacggactcagactatcagctcccgtacgtgctcgggtcggctcacgagggctgcctcccgccgttcccagcggacgttttcatgattcctcagtacgggtatctgacgcttaatgatggaagccaggccgtgggtcgttcgtccttttactgcctggaatatttcccgtcgcaaatgctaagaacgggtaacaacttccagttcagctacgagtttgagaacgtacctttccatagcagctacgctcacagccaaagcctggaccgactaatgaatccactcatcgaccaatacttgtactatctctcaaagactattaacggttctggacagaatcaacaaacgctaaaattcagtgtggccggacccagcaacatggctgtccagggaagaaactacatacctggacccagctaccgacaacaacgtgtctcaaccactgtgactcaaaacaacaacagcgaatttgcttggcctggagcttcttcttgggctctcaatggacgtaatagcttgatgaatcctggacctgctatggccagccacaaagaaggagaggaccgtttctttcctttgtctggatctttaatttttggcaaacaaggaactggaagagacaacgtggatgcggacaaagtcatgataaccaacgaagaagaaattaaaactactaacccggtagcaacggagtcctatggacaagtggccacaaaccaccagagtgcccaagcacaggcgcagaccggctgggttcaaaaccaaggaatacttccgggtatggtttggcaggacagagatgtgtacctgcaaggacccatttgggccaaaattcctcacacggacggcaactttcacccttctccgctgatgggagggtttggaatgaagcacccgcctcctcagatcctcatcaaaaacacacctgtacctgcggatcctccaacggccttcaacaaggacaagctgaactctttcatcacccagtattctactggccaagtcagcgtggagatcgagtgggagctgcagaaggaaaacagcaagcgctggaacccggagatccagtacacttccaactattacaagcctaataatgttgaatttgctgttaatactgaaggtgtatatagtgaaccccgccccattggcaccagatacctgactcgtaatctg

SEQ ID NO: 805 - protein, 736 aa, Artificial Sequence
  Description of Artificial Sequence: Synthetic polypeptide
MAADGYLPDWLEDNLSEGIREWWALKPGAPQPKANQQHQDNARGLVLPGYKYLGPGNGLDKGEPVNAADAAALEHDKAYDQQLKAGDNPYLKYNHADAEFQERLKEDTSFGGNLGRAVFQAKKRLLEPLGLVEEAAKTAPGKKRPVEQSPQEPDSSAGIGKSGAQPAKKRLNFGQTGDTESVPDPQPIGEPPAAPSGVGSLTMASGGGAPVADNNEGADGVGSSSGNWHCDSQWLGDRVITTSTRTWALPTYNNHLYKQISNSTSGGSSNDNAYFGYSTPWGYFDFNRFHCHFSPRDWQRLINNNWGFRPKRLNFKLFNIQVKEVTDNNGVKTIANNLTSTVQVFTDSDYQLPYVLGSAHEGCLPPFPADVFMIPQYGYLTLNDGSQAVGRSSFYCLEYFPSQMLRTGNNFQFSYEFENVPFHSSYAHSQSLDRLMNPLIDQYLYYLSKTINGSGQNQQTLKFSVAGPSNMAVQGRNYIPGPSYRQQRVSTTVTQNNNSEFAWPGASSWALNGRNSLMNPGPAMASHKEGEDRFFPLSGSLIFGKQGTGRDNVDADKVMITNEEEIKTTNPVATESYGQVATNHQSAQAQAQTGWVQNQGILPGMVWQDRDVYLQGPIWAKIPHTDGNFHPSPLMGGFGMKHPPPQILIKNTPVPADPPTAFNKDKLNSFITQYSTGQVSVEIEWELQKENSKRWNPEIQYTSNYYKPNNVEFAVNTEGVYSEPRPIGTRYLTRNL

SEQ ID NO: 806 - DNA, 2208 bp, Artificial Sequence
  Description of Artificial Sequence: Synthetic polynucleotide
atggctgccgatggttatcttccagattggctcgaggacaaccttagtgaaggaattcgcgagtggtgggctttgaaacctggagcccctcaacccaaggcaaatcaacaacatcaagacaacgctcgaggtcttgtgcttccgggttacaaataccttggacccggcaacggactcgacaagggggagccggtcaacgcagcagacgcggcggccctcgagcacaacaaggcctacgaccagcagctcaaggccggagacaacccgtacctcaagtgcaaccacgccgacgccgagttccaggagcggctcaaagaagatacgtcttttgggggcaacctcgggcgagcagtcttccaggccaaaaagaggcctcttgaacctcttggtctggttgaggaagcggctaagacggctcctggaaagaagaggcctgtagagcagtctcctcaggaaccggactcctccgcgggtattggcaaatcgggtgcacagcccgctaaaaagagactcaatttcggtcagactggcgacacagagtcagtcccagaccctcaaccaatcggagaacctcccgcagccccctcaggtgtgagatctcttacaatggcttcaggtggtggcgcaccagtggcagacaataacgaaggtgccgatggagtgggtagttcctcgggaaattggcattgcgattcccaatggctgggggacagagtcatcaccaccagcacccgaacctgggccctgcccacctacaacaatcacctctacaagcaaatctccaacagcacatctggaggatcttcaaatgacaacgcctacctcggctacagcaccccctgggggtattttgacttcaacagattccactgccacttctcaccacgtgactggcagcgactcatcaacaacaactggggattccggcctaagcgactcaacttcaagctcttcaacattcaggtcaaagaggttacggacaacaatggagtcaagaccatcgccaataaccttaccagcacggtccaggtcttcacggactcagactatcagctcccgtacgtgctcgggtcggctcacgagggctgcctcccgccgttcccagcggacgttttcatgattcctcagtacgggtatctgacgcttaatgatggaagccaggccgtgggtcgttcgtccttttactgcctggaatatttcccgtcgcaaatgctaagaacgggtaacaacttccagttcagctacgagtttgagaacgtacctttccatagcagctacgctcacagccaaagcctggaccgactaatgaatccactcatcgaccaatacttgtactatctctcaaagactattaacggttctggacagaatcaacaaacgctaaaattcagtgtggccggacccagcaacatggctgtccagggaagaaactacatacctggacccagctaccgacaacaacgtgtctcaaccactgtgactcaaaacaacaacagcgaatttgcttggcctggagcttcttcttgggctctcaatggacgtaatagcttgatgaatcctggacctactatggccagccacaaagaaggagaggaccgtttctttcctttgtctggatctttaatttttggcaaacaaggaactggaagagacaacgtggatgcggacaaagtcatgataaccaacgaagaagaaattaaaactactaacccggtagcaacggagtcctatggacaagtggccacaaaccaccagagtgcccaagcacaggcgcagaccggctgggttcaaaaccaaggaatacttccgggtatggtttggcaggacagagatgtgtacctgcaaggacccatttgggccaaaattcctcacacggacggcaactttcacccttctccgctgatgggagggtttggaatgaagcacccgcctcctcagatcctcatcaaaaacacacctgtacctgcggatcctccaacggccttcaacaaggacaagctgaactctttcatcacccagtattctactggccaagtcagcgtggagatcgagtgggagctgcagaaggaaaacagcaagcgctggaacccggagatccagtacacttccaactattacaagtctaataatgttgaatttgctgttaatactgaaggtgtatatagtgaaccccgccccattggcaccagatacctgactcgtaatctg

SEQ ID NO: 807 - protein, 736 aa, Artificial Sequence
  Description of Artificial Sequence: Synthetic polypeptide
MAADGYLPDWLEDNLSEGIREWWALKPGAPQPKANQQHQDNARGLVLPGYKYLGPGNGLDKGEPVNAADAAALEHNKAYDQQLKAGDNPYLKCNHADAEFQERLKEDTSFGGNLGRAVFQAKKRPLEPLGLVEEAAKTAPGKKRPVEQSPQEPDSSAGIGKSGAQPAKKRLNFGQTGDTESVPDPQPIGEPPAAPSGVRSLTMASGGGAPVADNNEGADGVGSSSGNWHCDSQWLGDRVITTSTRTWALPTYNNHLYKQISNSTSGGSSNDNAYLGYSTPWGYFDFNRFHCHFSPRDWQRLINNNWGFRPKRLNFKLFNIQVKEVTDNNGVKTIANNLTSTVQVFTDSDYQLPYVLGSAHEGCLPPFPADVFMIPQYGYLTLNDGSQAVGRSSFYCLEYFPSQMLRTGNNFQFSYEFENVPFHSSYAHSQSLDRLMNPLIDQYLYYLSKTINGSGQNQQTLKFSVAGPSNMAVQGRNYIPGPSYRQQRVSTTVTQNNNSEFAWPGASSWALNGRNSLMNPGPTMASHKEGEDRFFPLSGSLIFGKQGTGRDNVDADKVMITNEEEIKTTNPVATESYGQVATNHQSAQAQAQTGWVQNQGILPGMVWQDRDVYLQGPIWAKIPHTDGNFHPSPLMGGFGMKHPPPQILIKNTPVPADPPTAFNKDKLNSFITQYSTGQVSVEIEWELQKENSKRWNPEIQYTSNYYKSNNVEFAVNTEGVYSEPRPIGTRYLTRNL

SEQ ID NO: 808 - DNA, 2208 bp, Artificial Sequence
  Description of Artificial Sequence: Synthetic polynucleotide
atggctgccgatggttatcctccagattggctcgaggacaaccttagtgaaggaattcgcgagtggtgggctttgaaacctggagcccctcaacccaaggcaaatcaacaacatcaagacaacgctcgaggtcttgtgcttccgggttacaaataccttggacccggcaacggactcgacaagggggagccggtcaacgcagcagacgcggcggccctcgagcacgacaaggcctacgaccagcagctcaaggccggggacaacccgcacctcaagtacaaccacgccgacgccgagttccaggagcggctcaaagaagatacgtcttttgggggcaacctcgggcgagcagtcttccaggccaaaaagaggcttcttgaacctcttggtctggttgaggaagcggctaagacggctcctggaaagaagaggcccgtagagcagtctcctcaggaaccggactcctccgcgggtattggcaaatcgggtgcacagcccgctaagaagagactcaatttcggtcagactggcgacactgagtcagtcccagaccctcaaccaatcggagaacctcccgcagccccctcaggtgtgggatctcttacaatggcttcaggtggtggcgcaccagtggcagacaataacgaaggtgccgatggagtgggtagttcctcgggaaattggcattgcgattcccaatggctgggggacagagtcatcaccaccagcacccgaacctgggccctgcccacctacaacaatcacctctacaagcaaatctccaacagcacatctggaggatcttcaaatgacaacgcctacttcggctacagcaccccctgggggtattttgacttcaacagattccactgccacttctcaccacgtgactggcagcgactcatcaacaacaactggggattccggcctaagcgactcaacttcaagctcttcaacattcaggtcaaagaggttacggacaacaatggagtcaagaccatcgccaataaccttaccagcacggtccaggtcttcacggactcagactatcagctcccgtacgtgctcgggtcggctcacgagggctgcctcccgccgttcccagcggacgttttcatgattcctcagtacgggtatctgacgcttaatgatggaagccaggccgtgggtcgttcgtccttttactgcctggaatatttcccgtcgcaaatgctaagaacgggtaacaacttccagttcagctacgagtttgagaacgtacctttccatagcagctacgctcacagccaaagcctggaccgactaatgaatccactcatcgaccaatacttgtactatctctcaaagactattaacggttctggacagaatcaacaaacgctaaaattcagtgtggccggacccagcaacatggctgtccagggaagaaactacatacctggacccagctaccgacaacaacgtgtctcaaccactgtgactcaaaacaacaacagcgaatttgcttggcctggagcttcttcttgggctctcaatggacgtaatagcttgatgaatcctggacctgctatggccagccacaaagaaggagaggaccgtttctttcctttgtctggatctttaatttttggcaaacaaggaactggaagagacaacgtggatgcggacaaagtcatgataaccaacgaagaagaaattaaaactactaacccggtagcaacggagtcctatggacaagtggccacaaaccaccagagtgcccaagcacaggcgcagaccggctgggttcaaaaccaaggaatacttccgggtatggtttggcaggacagagatgtgtacctgcaaggacccatttgggccaaaattcctcacacggacggcaactttcacccttctccgctgatgggagggtttggagtgaagcacccgcctcctcagatcctcatcaaaaacacacctgtacctgcggatcctccaacggccttcaacaaggacaggctgaactctttcatcacccagtattctactggccaagtcagcgtggagatcgagtgggagctgcagaaggaaaacagcaagcgctggaacccggagatccagtacacttccaactattacaagtctaataatgttgaatttgctgttaatactgaaggtgtatatagtgaaccccgccccattggcaccagatacctgactcgtaatctg

SEQ ID NO: 809 - protein, 736 aa, Artificial Sequence
  Description of Artificial Sequence: Synthetic polypeptide
MAADGYPPDWLEDNLSEGIREWWALKPGAPQPKANQQHQDNARGLVLPGYKYLGPGNGLDKGEPVNAADAAALEHDKAYDQQLKAGDNPHLKYNHADAEFQERLKEDTSFGGNLGRAVFQAKKRLLEPLGLVEEAAKTAPGKKRPVEQSPQEPDSSAGIGKSGAQPAKKRLNFGQTGDTESVPDPQPIGEPPAAPSGVGSLTMASGGGAPVADNNEGADGVGSSSGNWHCDSQWLGDRVITTSTRTWALPTYNNHLYKQISNSTSGGSSNDNAYFGYSTPWGYFDFNRFHCHFSPRDWQRLINNNWGFRPKRLNFKLFNIQVKEVTDNNGVKTIANNLTSTVQVFTDSDYQLPYVLGSAHEGCLPPFPADVFMIPQYGYLTLNDGSQAVGRSSFYCLEYFPSQMLRTGNNFQFSYEFENVPFHSSYAHSQSLDRLMNPLIDQYLYYLSKTINGSGQNQQTLKFSVAGPSNMAVQGRNYIPGPSYRQQRVSTTVTQNNNSEFAWPGASSWALNGRNSLMNPGPAMASHKEGEDRFFPLSGSLIFGKQGTGRDNVDADKVMITNEEEIKTTNPVATESYGQVATNHQSAQAQAQTGWVQNQGILPGMVWQDRDVYLQGPIWAKIPHTDGNFHPSPLMGGFGVKHPPPQILIKNTPVPADPPTAFNKDRLNSFITQYSTGQVSVEIEWELQKENSKRWNPEIQYTSNYYKSNNVEFAVNTEGVYSEPRPIGTRYLTRNL

SEQ ID NO: 810 - DNA, 2208 bp, Artificial Sequence
  Description of Artificial Sequence: Synthetic polynucleotide
atggctgccgatggttatcttccagattggctcgaggacaaccttagtgaaggaattcgcgagtggtgggctttgaaacctggagcccctcaacccaaggcaaatcaacaacatcaagacaacgctcgaggtcttgtgcttccgggttacaaataccttggacccggcaacggactcgacaagggggagccggtcaacgcagcagacgcggcggccctcgagcacgacaaggcctacgaccagcagctcaaggccggagacaacccgtacctcaagtacaaccacgccgacgccgagttccaggagcggctcaaagaagatacgtcttttgggggcaacctcgggcgagcagtcttccaggccaaaaagaggcttcttgaacctcttggtctggttgaggaagcggctaagacggctcctggaaagaagaggcctgtagagcagtctcctcaggaaccggactcctccgcgggtattggcaaatcgggtgcacagcccgctaaaaagagactcaatttcggtcagactggcgacacagagtcagtcccagaccctcaaccaatcggagaacctcccgcagccccctcaggtgtgggatctcttacaatggcttcaggtggtggcgcaccagtggcggacaataacgaaggtgccgatggagtgggtagttcctcgggaaattggcattgcgattcccaatggctgggggacagagtcatcaccaccagcacccgaacctgggccctgcccacctacaacaatcacctctacaagcaaatctccaacagcacatctggaggatcttcaaatgacaacgcctacttcggctacagcaccccctgggggtattttgacttcaacagattccactgccacttctcaccacgtgactggcagcgactcatcaacaacaactggggattccggcctaagcgactcaacttcaagctcttcaacattcaggtcaaagaggttacggacaacaatggagtcaagaccatcgccaataaccttaccagcacggtccaggtcttcacggactcagactatcagctcccgtacgtgctcgggtcggctcacgagggctgcctcccgccgttcccagcggacgttttcatgattcctcagtacgggtatctgacgcttaatgatggaagccaggccgtgggtcgttcgtccttttactgcctggaatatttcccgtcgcaaatgctaagaacgggtaacaacttccagttcagctacgagtttgagaacgtacctttccatagcagctacgctcacagccaaagcctggaccgactaatgaatccactcatcgaccaatacttgtactatctctcaaagactattaacggttctggacagaatcaacaaacgctaaaattcagtgtggccggacccagcaacatggctgtccagggaagaaactacatacctggacccagctaccgacaacaacgtgtctcaaccactgtgactcaaaacaacaacagcgaatttgcttggcctggagcttcttcttgggctctcaatggacgtaatagtttgatgaatcctggacctgctatggccagccacaaagaaggagaggaccgtttctttcctttgtctggatctttaatttttggcaaacaaggaactggaagagacaacgtggatgcggacaaagtcatgataaccaacgaagaagaaattaaaactactaacccggtagcaacggagtcctatggacaagtggccacaaaccaccagagtgcccaagcacaggcgcagaccggctgggttcaaaaccaaggaatacttccgggtatggtttggcaggacagagatgtgtacctgcaaggacccatttgggccaaaattcctcacacggacggcaactttcacccttctccgctgatgggagggtttggagtgaagcacccgcctcctcagatcctcatcaaaaacacacctgtacctgcggatcctccaacggccttcaacaaggacaagctgaactctttcatcacccagtattctactggccaagtcagcgtggagatcgagtgggagctgcagaaggaaaacagcaagcgctggaacccggagatccagtacacttccaactattacaagtctaataatgttgaatttgctgttaatactgaaggtgtatatagtgaaccccgccccattggcaccagatacctgactcgtaatctg

SEQ ID NO: 811 - protein, 736 aa, Artificial Sequence
  Description of Artificial Sequence: Synthetic polypeptide
MAADGYLPDWLEDNLSEGIREWWALKPGAPQPKANQQHQDNARGLVLPGYKYLGPGNGLDKGEPVNAADAAALEHDKAYDQQLKAGDNPYLKYNHADAEFQERLKEDTSFGGNLGRAVFQAKKRLLEPLGLVEEAAKTAPGKKRPVEQSPQEPDSSAGIGKSGAQPAKKRLNFGQTGDTESVPDPQPIGEPPAAPSGVGSLTMASGGGAPVADNNEGADGVGSSSGNWHCDSQWLGDRVITTSTRTWALPTYNNHLYKQISNSTSGGSSNDNAYFGYSTPWGYFDFNRFHCHFSPRDWQRLINNNWGFRPKRLNFKLFNIQVKEVTDNNGVKTIANNLTSTVQVFTDSDYQLPYVLGSAHEGCLPPFPADVFMIPQYGYLTLNDGSQAVGRSSFYCLEYFPSQMLRTGNNFQFSYEFENVPFHSSYAHSQSLDRLMNPLIDQYLYYLSKTINGSGQNQQTLKFSVAGPSNMAVQGRNYIPGPSYRQQRVSTTVTQNNNSEFAWPGASSWALNGRNSLMNPGPAMASHKEGEDRFFPLSGSLIFGKQGTGRDNVDADKVMITNEEEIKTTNPVATESYGQVATNHQSAQAQAQTGWVQNQGILPGMVWQDRDVYLQGPIWAKIPHTDGNFHPSPLMGGFGVKHPPPQILIKNTPVPADPPTAFNKDKLNSFITQYSTGQVSVEIEWELQKENSKRWNPEIQYTSNYYKSNNVEFAVNTEGVYSEPRPIGTRYLTRNL

SEQ ID NO: 812 - DNA, 2208 bp, Artificial Sequence
  Description of Artificial Sequence: Synthetic polynucleotide
atggctgccgatggttatcttccagattggctcgaggacaaccttagtgaaggaattcgcgagtggtgggctttgaaacctggagcccctcaacccaaggcaaatcaacaacatcaagacaacgctcgaggtcttgtgcttccgggttacaaataccttggacccggcaacggactcgacaagggggagccggtcaacgcagcagacgcggcggccctcgagcacgacaaggcctacgaccagcagctcaaggccggagacaacccgtacctcaagtacaaccacgccgacgccgagttccaggagcggctcaaagaagatacgtcttttgggggcaacctcgggcgagcagtcttccaggccaaaaagaggcttcttgaacctcttggtctggttgaggaagcggctaagacggctcctggaaagaagaggcctgtagagcagtctcctcaggaaccggactcctccgcgggtattggcaaatcgggtgcacagcccgctaaaaagagactcaatttcggtcagactggcgacacagagtcagtcccagaccctcaaccaatcggagaacctcccgcagccccctcaggtgtgggatctcttacaatggcttcaggtggtggcgcaccagtggcagacaataacgaaggtgccgatggagtgggtagttcctcgggaaattggcattgcgattcccaatggctgggggacagagtcatcaccaccagcacccgaacctgggccctgcccacttacaacaatcacctctacaagcaaatctccaacagcacatctggaggatcttcaaatgacaacgcctacttcggctacagcaccccctgggggtattttgacttcaacagattccactgccacttctcaccacgtgactggcagcgactcaccaacaacaactggggattccggcctaagcgactcaacttcaagctcttcaacattcaggtcaaagaggttacggacaacaatggagtcaagaccatcgccaataaccttaccagcacggtccaggtcttcacggactcagactatcagctcccgtacgtgctcgggtcggctcacgagggctgcctcccgccgttcccagcggacgttttcatgattcctcagtacgggtatctgacgcttaatgatggaagccaggccgtgggtcgttcgtccttttactgcctggaatatatcccgtcgcaaatgctaagaacgggtaacaacttccagttcagctacgagtttgagaacgtacctttccatagcagctacgctcacagccaaagcctggaccgactaatgaatccactcatcgaccaatacttgtactatctctcaaagactattaacggttctggacagaatcaacaaacgctaaaattcagtgtggccggacccagcaacatggctgtccagggaagaaactacatacctggacccagctaccgacaacaacgtgtctcaaccactgtgactcaaaacaacaacagcgaatttgcttggcctggagcttcttcttgggctctcaatggacgtaatagcttgatgaatcctggacctgctatggccagccacaaagaaggagaggaccgtttctttcctttgtctggatctttaatttttggcaaacaaggaactggaagagacaacgtggatgcggacaaagtcatgataaccaacgaagaagaaattaaaactactaacccggtagcaacggagtcctatggacaagtggccacaaaccaccagagtgcccaagcacaggcgcagaccggctgggttcaaaaccaaggaatacttccgggtatggtttggcaggacagagatgtgtacctgcaaggacccatttgggccaaaattcctcacacggacggcaactttcacccttctccgctgatgggagggtttggagtgaagcacccgcctcctcagatcctcatcaaaaacacacctgtacctgcggatcctccaacggccttcaacaaggacaagctgaactctttcatcacccagtattctactggccaagtcagcgtggagatcgagtgggagctgcagaaggaaaacagcaagcgctggaacccggagatccagtacacttccaactattacaagtctaataatgttgaatttgctgttaatactgaaggtgtatatagtgaaccccgccccattggcaccagatacctgactcgtaatctg

SEQ ID NO: 813 - protein, 736 aa, Artificial Sequence
  Description of Artificial Sequence: Synthetic polypeptide
MAADGYLPDWLEDNLSEGIREWWALKPGAPQPKANQQHQDNARGLVLPGYKYLGPGNGLDKGEPVNAADAAALEHDKAYDQQLKAGDNPYLKYNHADAEFQERLKEDTSFGGNLGRAVFQAKKRLLEPLGLVEEAAKTAPGKKRPVEQSPQEPDSSAGIGKSGAQPAKKRLNFGQTGDTESVPDPQPIGEPPAAPSGVGSLTMASGGGAPVADNNEGADGVGSSSGNWHCDSQWLGDRVITTSTRTWALPTYNNHLYKQISNSTSGGSSNDNAYFGYSTPWGYFDFNRFHCHFSPRDWQRLTNNNWGFRPKRLNFKLFNIQVKEVTDNNGVKTIANNLTSTVQVFTDSDYQLPYVLGSAHEGCLPPFPADVFMIPQYGYLTLNDGSQAVGRSSFYCLEYIPSQMLRTGNNFQFSYEFENVPFHSSYAHSQSLDRLMNPLIDQYLYYLSKTINGSGQNQQTLKFSVAGPSNMAVQGRNYIPGPSYRQQRVSTTVTQNNNSEFAWPGASSWALNGRNSLMNPGPAMASHKEGEDRFFPLSGSLIFGKQGTGRDNVDADKVMITNEEEIKTTNPVATESYGQVATNHQSAQAQAQTGWVQNQGILPGMVWQDRDVYLQGPIWAKIPHTDGNFHPSPLMGGFGVKHPPPQILIKNTPVPADPPTAFNKDKLNSFITQYSTGQVSVEIEWELQKENSKRWNPEIQYTSNYYKSNNVEFAVNTEGVYSEPRPIGTRYLTRNL

SEQ ID NO: 814 - DNA, 2208 bp, Artificial Sequence
  Description of Artificial Sequence: Synthetic polynucleotide
atggctgccgatggttatcttccagattggctcgaggacaaccttagtgaaggaattcgcgagtggtgggctttgaaacctggagcccctcaacccaaggcaaatcaacaacatcaagacaacgctcgaggtcttgtgcttccgggttacaaataccttggacccggcaacggactcgacaagggggagccggtcaacgcagcagacgcggcggccctcgagcacgacaaggcctacgaccagcagctcaaggccggagacaacccgtacctcaagtacaaccacgccgacgccgagttccaggagcggctcaaagaagatacgtcttttgggggcaacctcgggcgagcagtcttccaggccaaaaagaggcttcttgaacctcttggtctggttgaggaagcggctaagacggctcctggaaagaagaggcctgtagagcagtctcctcaggaaccggactcctccgcgggtattggcaaatcgggtgcacagcccgctaaaaagagactcaatttcggtcagactggcgacacagagtcagtcccagaccctcaaccaatcggagaacctcccgcagccccctcaggtgtgggatctcttacaatggcttcaggtggtggcgcaccagtggcagacaataacgaaggtgccgatggagtgggtagttcctcgggaaattggcattgcgattcccaatggctgggggacagagtcatcaccaccagcacccgaacctgggccctgcccacctacaacaatcacctctacaagcaaatctccaacagcacatctggaggatcttcaaatgacaacgcctacttcggctacagcaccccctgggggtattttgacttcaacagattccactgccacttctcaccacgtgactggcagcgactcatcaacaacaactggggattccggcctaagcgactcaacttcaagctcttcaacattcaggtcaaagaggttacggacaacaatggagtcaagaccatcgccaataaccttaccagcacggtccaggtcttcacggactcagactatcagctcccgtacgtgctcgggtcggctcacgagggctgcctcccgccgttcccagcggacgttttcatgattcctcagtacgggtatctgacgcttaatgatggaagccaggccgtgggtcgttcgtccttttactgcctggaatatttcccgtcgcaaatgctaagaacgggtaacaacttccagtttagctacgagtttgagaacgtacctttccatagcagctacgctcacagccaaagcctggaccgactaatgaatccactcatcgaccaatacttgtactatctctcaaagactattaacggttctggacagaatcaacaaacgctaaaattcagtgtggccggacccagcaacatggctgtccagggaagaaactacatacctggacccagctaccgacaacaacgtgtctcaaccactgtgactcaaaacaacaacagcgaatttgcttggcctggagcttcttcttgggctctcaatggacgtaatagcttgatgaatcctggacctgctatggccagccacaaagaaggagaggaccgtttctttcctttgtctggatctttaatttctggcaaacaaggaactggaagagacaacgtggatgcgaacaaagtcatgataaccaacgaagaagaaattaaaactactaacccggtagcaacggagtcctatggacaagtggccacaaaccaccagagtgcccaagcacaggcgcagaccggctgggttcaaaaccaaggaatacttccgggtatggtttggcaggacagagatgtgtacctgcaaggacccatttgggccaaaattcctcacacggacggcaactttcacccttctccgctgatgggagggtttgaaatgaagcacccgcctcctcagatcctcatcaaaaacacacctgtacctgcggatcctccaacggccttcaacaaggacaagctgaactctttcatcacccagtattctactggccaagtcagcgtggagatcgagtgggagctgcagaaggaaaacagcaagcgctggaacccggagatccagtacacttccaactattacaagtctaataatgttgaatttgctgttaatactgaaggtgtatatagtgaaccccgccccattggcaccagatacctgactcgtaatctg

SEQ ID NO: 815 - protein, 736 aa, Artificial Sequence
  Description of Artificial Sequence: Synthetic polypeptide
MAADGYLPDWLEDNLSEGIREWWALKPGAPQPKANQQHQDNARGLVLPGYKYLGPGNGLDKGEPVNAADAAALEHDKAYDQQLKAGDNPYLKYNHADAEFQERLKEDTSFGGNLGRAVFQAKKRLLEPLGLVEEAAKTAPGKKRPVEQSPQEPDSSAGIGKSGAQPAKKRLNFGQTGDTESVPDPQPIGEPPAAPSGVGSLTMASGGGAPVADNNEGADGVGSSSGNWHCDSQWLGDRVITTSTRTWALPTYNNHLYKQISNSTSGGSSNDNAYFGYSTPWGYFDFNRFHCHFSPRDWQRLINNNWGFRPKRLNFKLFNIQVKEVTDNNGVKTIANNLTSTVQVFTDSDYQLPYVLGSAHEGCLPPFPADVFMIPQYGYLTLNDGSQAVGRSSFYCLEYFPSQMLRTGNNFQFSYEFENVPFHSSYAHSQSLDRLMNPLIDQYLYYLSKTINGSGQNQQTLKFSVAGPSNMAVQGRNYIPGPSYRQQRVSTTVTQNNNSEFAWPGASSWALNGRNSLMNPGPAMASHKEGEDRFFPLSGSLISGKQGTGRDNVDANKVMITNEEEIKTTNPVATESYGQVATNHQSAQAQAQTGWVQNQGILPGMVWQDRDVYLQGPIWAKIPHTDGNFHPSPLMGGFEMKHPPPQILIKNTPVPADPPTAFNKDKLNSFITQYSTGQVSVEIEWELQKENSKRWNPEIQYTSNYYKSNNVEFAVNTEGVYSEPRPIGTRYLTRNL

SEQ ID NO: 816 - DNA, 2208 bp, Artificial Sequence
  Description of Artificial Sequence: Synthetic polynucleotide
atggctgccgatggttatcttccagattggctcgaggacaaccttagtgaaggaattcgcgagtggtgggctttgaaacctggagcccctcaacccaaggcaaatcaacaacatcaagacaacgctcgaggtcttgtgcttccgggttacaaataccttggacccggcaacggactcgacaagggggagccggtcaacgcagcagacgcggcggccctcgagcacgacaaggcctacgaccagcagctcaaggccggagacaacccgtacctcaagtacaaccacgccgacgccgagttccaggagcggctcaaagaagatacgtcttttgggggcaacctcgggcgagcagtcttccaggccaaaaagaggcttcttgaacctcttggtctggttgaggaagcggctaagacggctcctggaaagaagaggcctgtagagcagtctcctcaggaaccggactcctccgcgggtattggcaaatcgggtgcacagcccgctaaaaagagactcaatttcggtcagactggcgacacagagtcagtcccagaccctcaaccaatcggagaacctcccgcagccccctcaggtgtgggatctcttacaatagcttcaggtggtggcgcaccagtggcagacaataacgaaggtgccgatggagtgggtagttcctcgggaaattggcattgcgattcccaatggctgggggacagagtcatcaccaccagcacccgaacctgggccctgcccacctacaacaatcacctctacaagcgaatctccaacagcacatctggaggatcttcaaatgacaacgcctacttcggctacagcaccccctgggggtattttgacttcaacagattccactgccacttctcaccacgtgactggcagcgactcatcaacaacaactggggattccggcctaagcgactcaacttcaagcttttcaacattcgggtcaaagaggttacggacaacaatggagtcaagaccatcaccaataaccttaccagcacggtccaggtcttcacggactcagactatcagctcccgtacgtgcttgggtcggctcacgagggctgcctcccgccgttcccagcggacgttttcatgattcctcagtacgggtatctgacgcttaatgatggaagccaggccgtgggtcgttcgtccttttactgcctggaatatttcccgtcgcaaatgctaagaacgggtaacaacttccagttcagctacgagtttgagaacgtacctttccatagcagctacgctcacagccaaagcctggaccgactaatgaatccactcatcgaccaatacttgtactatctctcaaagactattaacggttctggacagaatcaacaaacgctaaaattcagtgtggccggacccagcaacatggctgtccagggaagaaactacatacctggacccagctaccgacaacaacgtgtctcaaccactgtgactcgaaacaacaacagcgaatttgcttggcctggagcttcttcttgggctctcaatggacgtaatagcttgatgaatcctggacctgctatggccagccacaaagaaggagaggaccgtttctttcctttgtctggatctttaatttttggcaaacaaggaactggaagagacaacgtggatgcggacaaagtcatgataaccaacgaagaagaaattaaaactactaacccggtagcaacggagtcctatggacaagtggccacaaaccaccagagtgcccaagcacaggcgcagaccggctgggttcaaaaccaaggaatacttccgggtatggtttggcaggacagagatgtgtacctgcaaggacccatttgggccaaaattcctcacacggacggcaactttcacccttctccgctgatgggagggtttggagtgaagcacccgcctcctcagatcctcatcaaaaacacacctgtacctgcggatcctccaacggccttcaacaaggacaagctgaactctttcatcacccagtattctactggccaagtcagcgtggagatcgagtgggagctgcagaaggaaaacagcaagcgctggaacccggagatccagtacacttccaactattacaagtctaataatgttgaatttgctgttaatactgaaggtgtatatagtgaaccccgccccattggcaccagatacctgactcgtaatctg

SEQ ID NO: 817 - protein, 736 aa, Artificial Sequence
  Description of Artificial Sequence: Synthetic polypeptide
MAADGYLPDWLEDNLSEGIREWWALKPGAPQPKANQQHQDNARGLVLPGYKYLGPGNGLDKGEPVNAADAAALEHDKAYDQQLKAGDNPYLKYNHADAEFQERLKEDTSFGGNLGRAVFQAKKRLLEPLGLVEEAAKTAPGKKRPVEQSPQEPDSSAGIGKSGAQPAKKRLNFGQTGDTESVPDPQPIGEPPAAPSGVGSLTIASGGGAPVADNNEGADGVGSSSGNWHCDSQWLGDRVITTSTRTWALPTYNNHLYKRISNSTSGGSSNDNAYFGYSTPWGYFDFNRFHCHFSPRDWQRLINNNWGFRPKRLNFKLFNIRVKEVTDNNGVKTITNNLTSTVQVFTDSDYQLPYVLGSAHEGCLPPFPADVFMIPQYGYLTLNDGSQAVGRSSFYCLEYFPSQMLRTGNNFQFSYEFENVPFHSSYAHSQSLDRLMNPLIDQYLYYLSKTINGSGQNQQTLKFSVAGPSNMAVQGRNYIPGPSYRQQRVSTTVTRNNNSEFAWPGASSWALNGRNSLMNPGPAMASHKEGEDRFFPLSGSLIFGKQGTGRDNVDADKVMITNEEEIKTTNPVATESYGQVATNHQSAQAQAQTGWVQNQGILPGMVWQDRDVYLQGPIWAKIPHTDGNFHPSPLMGGFGVKHPPPQILIKNTPVPADPPTAFNKDKLNSFITQYSTGQVSVEIEWELQKENSKRWNPEIQYTSNYYKSNNVEFAVNTEGVYSEPRPIGTRYLTRNL

SEQ ID NO: 818 - DNA, 2208 bp, Artificial Sequence
  Description of Artificial Sequence: Synthetic polynucleotide
atggctgccgatggttatcttccagattggctcgaggacaaccttagtgaaggaattcgcgagtggtgggctttgaaacctggagcccctcaacccaaggcaaatcaacaacatcaagacaacgctcgaggtcttgtgcttccgggttacaaataccttggacccggcaacggactcgacaagggggagccggtcaacgcagcagacgcggcggccctcgagcacgacaaggcctacgaccagcagctcaaggccggagacaacccgtacctcaagtacaaccacgccgacgccgagttccaggagcggctcaaagaagatacgtcttttgggggcaacctcgggcgagcagtcttccaggccaaaaagaggcttcttgaacctcttggtctggttgaggaagcggctaagacggctcctggaaagaagaggcctgtagagcagtctcctcaggaaccggactcctccgcgggtattggcaaatcgggcgcacagcccgctaaaaagagactcaatttcggtcagactggcgacacagagccagtcccagaccctcaaccaatcggagaacctcccgcagccccctcaggtgtgggatctcttacaatggcttcaggtggtggcgcaccagtggcagacaataacgaaggtgccgatggagtgggtagttcctcgggaaattggcattgcgattcccaatggctgggggacagagtcatcaccaccagcacccgaacctgggccctgcccacctacaacaatcacctctacaagcaaatctccaacagcacatctggaggatcttcaaatgacaacgcctacttcggctacagcaccccctgggggtattttgacttcaacagattccactgccacttctcaccacgtgactggcagcgactcatcaacaacaactggggattccggcctaagcgactcaacttcaagctcttcaacattcaggtcaaagaggttacggacaacaatggagtcaagaccatcgccaataaccttaccagcacggtccaggtcttcacggactcagactatcagctcccgtacgtgctcgggtcggctcacgagggctgcctcccgccgttcccagcgggcgttttcatgattcctcagtacgggtatctgacgcttaatgatggaagccaggccgtgggtcgttcgtccttttactgcctggaatatttcccgtcgcaaatgctaagaacgggtaacaacttccagttcagctacgagtttgagaacgtacctttccatagcagctacgctcacagccaaagcctggaccgactaatgaatccactcatcgaccaatacttgtactatctctcaaagactattaacggttctggacagaatcaacaaacgctaaaattcagtgtggccggacccagcaacatggctgtccagggaagaaactacatacctggacccagctaccgacaacaacgtgtctcaaccactgcgactcaaaacaacaacagcgaatttgcttggcctggagcttcttcttgggctctcaatggacgtaatagcttgatgaatcctggacctgctatggccagccacaaagaaggagaggaccgtttctttcctttgtctggatctttaatttttggcaaacaaggaactggaagagacaacgtggatgcggacaaagtcatgataaccaacgaagaagaaattaaaactactaacccggtagcaacggagtcctatggacaagtggccacaaaccaccagagtgcccaagcacaggcgcagaccggctgggttcaaaaccaaggaatacttccgggtatggtttggcaggacagagatgtgtacctgcaaggacccatttgggccaaaattcctcacacggacggcaactttcacccttctccgctgatgggagggtttggaatgaagcacccgcctcctcagatcctcatcaaaaacacacctgtacctgcggatcctccaacggccttcaacaaggacaagctgaactctttcatcacccagtattctactggccaagtcagcgtggagatcgagtgggagctgcagaaggaaaacagcaagcgctggaacccggagatccagtacacttccaactattacaagtctaataatgttgaatttgctgttaatactgaaggtgtatatagtgaaccccgccccattggcaccagatacctgactcgtaatctg

SEQ ID NO: 819 - protein, 736 aa, Artificial Sequence
  Description of Artificial Sequence: Synthetic polypeptide
MAADGYLPDWLEDNLSEGIREWWALKPGAPQPKANQQHQDNARGLVLPGYKYLGPGNGLDKGEPVNAADAAALEHDKAYDQQLKAGDNPYLKYNHADAEFQERLKEDTSFGGNLGRAVFQAKKRLLEPLGLVEEAAKTAPGKKRPVEQSPQEPDSSAGIGKSGAQPAKKRLNFGQTGDTEPVPDPQPIGEPPAAPSGVGSLTMASGGGAPVADNNEGADGVGSSSGNWHCDSQWLGDRVITTSTRTWALPTYNNHLYKQISNSTSGGSSNDNAYFGYSTPWGYFDFNRFHCHFSPRDWQRLINNNWGFRPKRLNFKLFNIQVKEVTDNNGVKTIANNLTSTVQVFTDSDYQLPYVLGSAHEGCLPPFPAGVFMIPQYGYLTLNDGSQAVGRSSFYCLEYFPSQMLRTGNNFQFSYEFENVPFHSSYAHSQSLDRLMNPLIDQYLYYLSKTINGSGQNQQTLKFSVAGPSNMAVQGRNYIPGPSYRQQRVSTTATQNNNSEFAWPGASSWALNGRNSLMNPGPAMASHKEGEDRFFPLSGSLIFGKQGTGRDNVDADKVMITNEEEIKTTNPVATESYGQVATNHQSAQAQAQTGWVQNQGILPGMVWQDRDVYLQGPIWAKIPHTDGNFHPSPLMGGFGMKHPPPQILIKNTPVPADPPTAFNKDKLNSFITQYSTGQVSVEIEWELQKENSKRWNPEIQYTSNYYKSNNVEFAVNTEGVYSEPRPIGTRYLTRNL

SEQ ID NO: 820 - DNA, 2208 bp, Artificial Sequence
  Description of Artificial Sequence: Synthetic polynucleotide
atggctgccgatggttatcttccagattggctcgaggacaaccttagtgaaggaattcgcgagtggtgggctttgaaacctggagcccctcaacccaaggcaaatcaacaacatcaagacaacgctcgaggtcttgtgcttccgggttacaaataccttggacccggcaacggactcgacaagggggagccggtcaacgcagcagacgcggcggccctcgagcacgacaaggcctacgaccagcagctcaaggccggagacaacccgtacctcaagtacaaccacgccgacgccgggttccaggagcggctcaaagaagatacgtcttttgggggcaacctcgggcgagcagtcttccaggccaaaaagaggcttcttgaacctcttggtctggttgaggaagcggctaagacggctcctggaaagaagaggcctgtagagcagtctcctcaggaaccggactcctccgcgggtattggcaaatcgggtgcacagcccgctaaaaagagactcaatttcggtcagactggcgacacagagtcagtcccagtccctcaaccaatcggagaacctcccgcagccccctcaggtgtgggatctcttacaatggcttcaggtggtggcgcaccagtggcagacaataacgaaggtgccgatggagtgggtagttcctcgggaaattggcattgcgattcccaatggctgggggacagagtcatcaccaccagcacccgaacctgggccctgcccacctacaacaatcacctctacaagcaaatctccaacagcacatctggaggatcttcaaatgacaacgcctacttcggctacagcaccccctgggggtattttgacttcaacagattccactgccacttctcaccacgtgactggcagcgactcatcaacaacaactggggattccggcctaagcgactcaacttcaagctcttcaacattcaggtcaaagaggttacggacaacaatggagtcaagaccatcgccaataaccttaccagcacggtccaggtcttcacggactcagactatcagctcccgtacgtgctcgggtcggctcacgagggctgcctcccgccgttcccagcggacgttttcatgattcctcagtacgggtatctgacgcttaatgatggaagccaggccgtgggtcgttcgtccttttactgcctggaatatttcccgtcgcaaatgctaagaacgggtaacaacttccagttcagctacgagtttgagaacgtacctttccatagcagctacgctcacagccaaagcctggaccgactaatgaatccactcatcgaccaatacttgtactatctctcaaagactattaacggttctggacagaatcaacaaacgctaaaattcagtgtggccggacccagcaacatggctgtccagggaagaaactacatacctggacccagctaccgacaacaacgtgtctcaaccactgtgactcaaaacaacaacagcgaatttgcttggcctggagcttcttcttgggctctcaatggacgtaatagcttgatgaatcctggacctgctatggccagccacaaagaaggagaggaccgtttctttcctttgtctggatctttaatttttggcaaacaaggagctggaagagacaacgtggatgcggacaaagtcatgataaccaacgaagaagaaattaaaactactaacccggtagcaacggagtcctatggacaagtggccacaaaccaccagagtgcccaagcacaggcgcagaccggctgggttcaaaaccaaggaatacttccgggtatggtttggcaggacagagatgtgtacctgcaaggacccatttgggccaaaattcctcacacggacggcaactttcacccttctccgctgatgggagggtttggaatgaagcacccgcctcctcagatcctcatcaaaaacacacctgtacctgcggatcctccaacggccttcaacaaggacaagctgaactctttcatcacccagtattctactggccaagtcagcgtggagatcgagtgggagctgcagaaggaaaacagcaagcgctggaacccggagatccagtacacttccaactattacaagtctaataatgttgaatttgctgttaatactgaaggtgtatatagtgaaccccgccccattggcaccagatacctgactcgtaatctg

SEQ ID NO: 821 - protein, 736 aa, Artificial Sequence
  Description of Artificial Sequence: Synthetic polypeptide
MAADGYLPDWLEDNLSEGIREWWALKPGAPQPKANQQHQDNARGLVLPGYKYLGPGNGLDKGEPVNAADAAALEHDKAYDQQLKAGDNPYLKYNHADAGFQERLKEDTSFGGNLGRAVFQAKKRLLEPLGLVEEAAKTAPGKKRPVEQSPQEPDSSAGIGKSGAQPAKKRLNFGQTGDTESVPVPQPIGEPPAAPSGVGSLTMASGGGAPVADNNEGADGVGSSSGNWHCDSQWLGDRVITTSTRTWALPTYNNHLYKQISNSTSGGSSNDNAYFGYSTPWGYFDFNRFHCHFSPRDWQRLINNNWGFRPKRLNFKLFNIQVKEVTDNNGVKTIANNLTSTVQVFTDSDYQLPYVLGSAHEGCLPPFPADVFMIPQYGYLTLNDGSQAVGRSSFYCLEYFPSQMLRTGNNFQFSYEFENVPFHSSYAHSQSLDRLMNPLIDQYLYYLSKTINGSGQNQQTLKFSVAGPSNMAVQGRNYIPGPSYRQQRVSTTVTQNNNSEFAWPGASSWALNGRNSLMNPGPAMASHKEGEDRFFPLSGSLIFGKQGAGRDNVDADKVMITNEEEIKTTNPVATESYGQVATNHQSAQAQAQTGWVQNQGILPGMVWQDRDVYLQGPIWAKIPHTDGNFHPSPLMGGFGMKHPPPQILIKNTPVPADPPTAFNKDKLNSFITQYSTGQVSVEIEWELQKENSKRWNPEIQYTSNYYKSNNVEFAVNTEGVYSEPRPIGTRYLTRNL

SEQ ID NO: 822 - DNA, 2208 bp, Artificial Sequence
  Description of Artificial Sequence: Synthetic polynucleotide
  misc_feature (377)..(377): n is a, c, g, or t
atggctgccgatggttatcttccagattggctcgaggacaaccttagtgaaggaattcgcgagaggtgggctttgaaacctggagcccctcaacccaaggcaaatcaacaacatcaagacaacgctcgaggtcttgtgcttccgggttacaaataccttggacccggcaacggactcgacaagggggagccggtcaacgcagcagacgcggcggccctcgagcacgacaaggcctacgaccagcagctcaaggccggagacaacccgtacctcaagtacaaccacgccgacgccgagttccaggagcggctcaaagaagatacgtcttttgggggcaacctcgggcgagcagtcttccaggccaaaaagaggcttcntgaacctcttggtctggttgaggaagcggctaagacggctcctggaaagaagaggcctgtagagcagtctcctcaggaaccggactcctccgcgggtattggcaaatcgggtgcacagcccgctaaaaagagactcaatttcggtcagactggcgacacagagtcagtcccagaccctcaaccaatcggagaacctcccgcagccccctcaggtgtgggatctcttacaatggcttcaggtggtggcgcaccagtggcagacaataacgaaggtgccgatggagtgggtagttcctcggggaattggcattgcgattcccaatggctgggggacagagtcatcaccaccagcacccgaacctgggccctgcccacctacaacaatcacctctacaagcaaatctccaacagcacatctggaggatcttcaaatgacaacgcctacttcggctacagcaccccctgggggtattttgacttcaacagattccactgccacttctcaccacgtgactggcagcgactcatcaacaacaactggggattccggcctaagcgactcaacttcaagctcttcaacattcaggtcaaagaggttacggacaacaatggagtcaagaccatcgccaataaccttaccagcacggtccaggtcttcacggactcagactatcagctcccgtacgtgctcgggtcggctcacgagggctgcctcccgccgttcccagcggacgttttcatgattcctcagtacgggtatctgacgcttaatgatggaagccaggccgtgggtcgttcgtccttttactgcctggaatatttcccgtcgcaaatgctaagaacgggtaacaacttccagttcagctacgagtttgagaacgtacctttccatagcagctacgctcacagccaaagcccggaccgactaatgaatccactcatcgaccaatacttgtactatctctcaaagactattaacggttctggacagaatcaacaaacgctaaaattcagtgtggccggacccagcaacatggctgtccagggaagaaactacatacctggacccagctaccgacaacaacgtgtctcaaccactgtgactcaaaacaacaacagcgaatttgcttggcctggagcttcttcttgggctctcaatggacgtaatagcttgatgaatcctggacctgctatggccagccacaaagaaggagaggaccgtttctttcctttgtctggatctttaatttttggcaaacaaggaactggaagagacaacgtggatgcggacaaagtcatgataaccaacgaagaagaaattaaaactactaacccggtagcaacggagtcctatggacaagtggccacaaaccaccagagtgcccaagcacaggcgcagaccggctgggttcaaaaccaaggaatacttccgggtatggtttggcaggacagagatgtgtacctgcaaggacccatttgggccaaaattcctcacacggacggcaactttcacccttctccgctgatgggagggtttggagtgaagcacccgcctcctcagatcctcatcaaaaacacacctgtacctgcggatcctccaacggccttcaacaaggacaagctgaactctttcatcacccagtattctactggccaagtcagcgtggagatcgagtgggagctgcagaaggaaaacagcaagcgctggaacccggagatccagtacacttccaactattacaagtctaataatgttgaatttgctgttaatactgaaggtgtatatagtgaaccccgccccattggcaccagatacctgactcgtaatctg

SEQ ID NO: 823 - protein, 736 aa, Artificial Sequence
  Description of Artificial Sequence: Synthetic polypeptide
  MOD_RES (126)..(126): Xaa = any naturally occurring amino acid
MAADGYLPDWLEDNLSEGIRERWALKPGAPQPKANQQHQDNARGLVLPGYKYLGPGNGLDKGEPVNAADAAALEHDKAYDQQLKAGDNPYLKYNHADAEFQERLKEDTSFGGNLGRAVFQAKKRLXEPLGLVEEAAKTAPGKKRPVEQSPQEPDSSAGIGKSGAQPAKKRLNFGQTGDTESVPDPQPIGEPPAAPSGVGSLTMASGGGAPVADNNEGADGVGSSSGNWHCDSQWLGDRVITTSTRTWALPTYNNHLYKQISNSTSGGSSNDNAYFGYSTPWGYFDFNRFHCHFSPRDWQRLINNNWGFRPKRLNFKLFNIQVKEVTDNNGVKTIANNLTSTVQVFTDSDYQLPYVLGSAHEGCLPPFPADVFMIPQYGYLTLNDGSQAVGRSSFYCLEYFPSQMLRTGNNFQFSYEFENVPFHSSYAHSQSPDRLMNPLIDQYLYYLSKTINGSGQNQQTLKFSVAGPSNMAVQGRNYIPGPSYRQQRVSTTVTQNNNSEFAWPGASSWALNGRNSLMNPGPAMASHKEGEDRFFPLSGSLIFGKQGTGRDNVDADKVMITNEEEIKTTNPVATESYGQVATNHQSAQAQAQTGWVQNQGILPGMVWQDRDVYLQGPIWAKIPHTDGNFHPSPLMGGFGVKHPPPQILIKNTPVPADPPTAFNKDKLNSFITQYSTGQVSVEIEWELQKENSKRWNPEIQYTSNYYKSNNVEFAVNTEGVYSEPRPIGTRYLTRNL

SEQ ID NO: 824 - DNA, 2208 bp, Artificial Sequence
  Description of Artificial Sequence: Synthetic polynucleotide
atggctgccgatggttatcttccagattggctcgaggacaaccttagtgaaggaattcgcgagtggtgggctttgaaacctggagcccctcaacccaaggcaaatcaacaacatcaagacaacgctcgaggtcttgtgcttccgggttacaaataccttggacccggcaacggactcgacaagggggagccggtcaacgcagcagacgcggcggccctcgagcacgacaaggcctacgaccagcagctcaaggccggagacaacccgtacctcaagtacaaccacgccgacgccgagttccaggagcggctcaaagaagatacgtcttttgggggcaacctcgggcgagcagtcttccaggccaaaaagaggcttcttgaacctcttggtctggttgaggaagcggctaagacggctcctggaaagaagaggcctgtagagcagtctcctcaggaaccggactcctccgcgggtattggcaaatcgggtgcacagcccgctaaaaagagactcaatttcggtcagactggcgacacagagtcagtcccagaccctcaaccaatcggagaacctcccgcagccccctcaggtgtgggatctcttacaatggcttcaggtggtggcgcaccagtggcagacaataacgaaggtgccgatggagtgggtagttcctcgggaaattggcattgcgattcccaatggctgggggacagagtcatcaccaccagcacccgaacctgggccctgcccacctacaacaatcacctctacaagcaaatctccaacagcacatctggaggatcttcaaatgacaacgcctacctcggctacagcaccccctgggggtattttgacttcaacagattccactgccacttctcaccacgtgactggcagcgactcatcaacaacaactggggattccggcctaagcgactcaacttcaagctcttcaacattcaggtcaaagaggttacggacaacaatggagtcaagaccatcgccaataaccttaccagcacggtccaggtcttcacggactcagactatcagctcccgtacgtgctcgggtcggctcacgagggctgcctcccgccgttcccagcggacgttttcatgattcctcagtacgggtatctgacgcttaatgatggaagccaggccgtgggtcgttcgtccttttactgcctggaatatttcccgtcgcaaatgctaagaacgggtaacaacttccagttcagctacgagtttgagaacgtacctttccatagcagctacgctcacagccaaagcctggaccgactaatgaatccactcatcgaccaatacttgtactatctctcaaagactattaacggttctggacagaatcaacaaacgctaaaattcagtgtggccggacccagcaacatggctgtccagggaagaaactacatacctggacccagctaccgacaacaacgtgtctcaaccactgtgactcaaaacaacaacagcgaatttgcttggcctggagcttcttcttgggctctcaatggacgtaatagcttgatgaatcctggacctgctatggccagccacaaagaaggagaggaccgtttctttcctttgtctggatctttaatttttggcaaacaaggaactggaagagacaacgtggatgcggacaaagtcatgataaccaacgaagaagaaattaaaactactaacccggtagcaacggagtcctatggacaagtggccacaaaccaccagagtgcccaagcacaggcgcagaccggctgggttcaaaaccaaggaatacttccgggtatggtttggcaggacagagatgtgtacctgcaaggacccatttgggccaaaattcctcacacggacggcaactttcacccttctccgctgatgggagggtttggaatgaagcacccgcctcctcagatcctcatcaaaaacacacctgtacctgcggatcctccaacggccttcaacaaggacaagctgaactctttcatcacccagtattctactggccaagtcagcgtggagatcgagtgggagctgcagaaggaaaacagcaagcgctggaacccggagatccagtacacttccaactattacaagtctaataatgttgaatttgctgttaatactgaaggtgtatatagtgaaccccgccccattggcaccagatacctgactcgtaatctg

SEQ ID NO: 825 - protein, 736 aa, Artificial Sequence
  Description of Artificial Sequence: Synthetic polypeptide
MAADGYLPDWLEDNLSEGIREWWALKPGAPQPKANQQHQDNARGLVLPGYKYLGPGNGLDKGEPVNAADAAALEHDKAYDQQLKAGDNPYLKYNHADAEFQERLKEDTSFGGNLGRAVFQAKKRLLEPLGLVEEAAKTAPGKKRPVEQSPQEPDSSAGIGKSGAQPAKKRLNFGQTGDTESVPDPQPIGEPPAAPSGVGSLTMASGGGAPVADNNEGADGVGSSSGNWHCDSQWLGDRVITTSTRTWALPTYNNHLYKQISNSTSGGSSNDNAYLGYSTPWGYFDFNRFHCHFSPRDWQRLINNNWGFRPKRLNFKLFNIQVKEVTDNNGVKTIANNLTSTVQVFTDSDYQLPYVLGSAHEGCLPPFPADVFMIPQYGYLTLNDGSQAVGRSSFYCLEYFPSQMLRTGNNFQFSYEFENVPFHSSYAHSQSLDRLMNPLIDQYLYYLSKTINGSGQNQQTLKFSVAGPSNMAVQGRNYIPGPSYRQQRVSTTVTQNNNSEFAWPGASSWALNGRNSLMNPGPAMASHKEGEDRFFPLSGSLIFGKQGTGRDNVDADKVMITNEEEIKTTNPVATESYGQVATNHQSAQAQAQTGWVQNQGILPGMVWQDRDVYLQGPIWAKIPHTDGNFHPSPLMGGFGMKHPPPQILIKNTPVPADPPTAFNKDKLNSFITQYSTGQVSVEIEWELQKENSKRWNPEIQYTSNYYKSNNVEFAVNTEGVYSEPRPIGTRYLTRNL

SEQ ID NO: 826 - DNA, 2175 bp, Artificial Sequence
  Description of Artificial Sequence: Synthetic polynucleotide
atgtcttttgttgatcaccctccagattggttggaagaagttggtgaaggtcttcgcgagtttttgggccttgaagcgggcccaccgaaaccaaaacccaatcagcagcatcaagatcaagcccgtggtcttgtgctgcctggttataactatctcggacccggaaacggtctcgatcgaggagagcctgccaacagggcagacgaggtcgcgcgagagcacgacatctcgtacaacgagcagcttgaggcgggagacaacccctacctcaagtacaaccacgcgggcgccgagtttcaggagaagctcgccgacgacacatccttcgggggaaacctcggaaaggcagtctttcaggccaagaaaagggttctcgaaccttttggcctggttgaagagggtgctaagacggcccctaccggaaagcggatagacgaccactttccaaaaagaaagaaggcccggaccgaagaggactccaagccttccacctcgtcagacgccgaagctggacccagcggatcccagcagctgcaaatcccagcccaaccagcctcaagtttgggagctgatacaatgtctgcgggaggtggcggcccattgggcgacaataaccaaggtgccgatggagtgggcaatgcctcgggagattggcattgcgattccacgtggatgggggacagagtcgtcaccaagtccacccgaacctgggtgctgcccggctacaacaaccaccagtaccgagagatcaaaagcggctccgtcgacggaagcaacgccaacgcctactttggatacagcaccccctgggggtactttgactttaaccgcttccacagccactggagcccccgagactggcaaagactcatcaacaactactggggcttcagaccccggtccctcagagtcaaaatcttcaacattcaagtcaaagaggtcacggtgcaggactccaccaccaccatcgccaacaacctcacctccaccgtccaagtgtttacggacgacgactaccagctgccctacgtcgtcggcaacgggaccgagggatgcctgccggccttccctccgcaggtctttacgctgccgcagtacggttacgcgacgctgaaccgcgacaacacagaaaatcccaccgagaggagcagcttcttctgcctagagtactttcccagcaagatgctgagaacgggcaacaactttgagtttacctacaactttgaggaggtgcccttccactccagcttcgctcccagtcagaacctcttcaagctggccaacccgctggtggaccagtacttgtaccgcttcgtgagcacaaataatactggcggagtccagttcaacaagaacctggccgggagatacgccaacacctacaaaaactggttcccggggcccatgggccgaacccagggctggaacctgggctccggggtcaaccgcgccagtgtcagcgccttcgccacgaccaataggatggagctcgagggcgcgagttaccaggtgcccccgcagccgaacggcatgaccaacaacctccagggcagcaacacctatgccctggagaacactatgatcttcaacagccagccggcgaacccgggcaccaccgccacgtacctcgagggcaacatgctcatcaccagcgagagcgagacgcagccggtgaaccgcgtggcgtacaacgtcggcgggcagatggccaccaacaaccagagctccaccactgcccccgcgaccggcacgtacaacctccaggaaatcgtgcccggcagcgtgtggatggagagggacgtgtacctccaaggacccatctgggccaagatcccagagacgggggcgcactttcacccctctccggccatgggcggattcggactcaaacacccaccgcccatgatgctcatcaagaacacgcctgtgcccggaaatatcaccagcttctcggacgtgcccgtcagcagcttcatcacccagtacagcaccgggcaggtcaccgtggagatggagtgggagctcaagaaggaaaactccaagaggtggaacccagagatccagtacacaaacaactacaacgacccccagtttgtggactttgccccggacagcaccggggaatacagaaccaccagacctatcggaacccgataccttacccgacccctttaa

SEQ ID NO: 827 - protein, 724 aa, Artificial Sequence
  Description of Artificial Sequence: Synthetic polypeptide
MSFVDHPPDWLEEVGEGLREFLGLEAGPPKPKPNQQHQDQARGLVLPGYNYLGPGNGLDRGEPANRADEVAREHDISYNEQLEAGDNPYLKYNHAGAEFQEKLADDTSFGGNLGKAVFQAKKRVLEPFGLVEEGAKTAPTGKRIDDHFPKRKKARTEEDSKPSTSSDAEAGPSGSQQLQIPAQPASSLGADTMSAGGGGPLGDNNQGADGVGNASGDWHCDSTWMGDRVVTKSTRTWVLPGYNNHQYREIKSGSVDGSNANAYFGYSTPWGYFDFNRFHSHWSPRDWQRLINNYWGFRPRSLRVKIFNIQVKEVTVQDSTTTIANNLTSTVQVFTDDDYQLPYVVGNGTEGCLPAFPPQVFTLPQYGYATLNRDNTENPTERSSFFCLEYFPSKMLRTGNNFEFTYNFEEVPFHSSFAPSQNLFKLANPLVDQYLYRFVSTNNTGGVQFNKNLAGRYANTYKNWFPGPMGRTQGWNLGSGVNRASVSAFATTNRMELEGASYQVPPQPNGMTNNLQGSNTYALENTMIFNSQPANPGTTATYLEGNMLITSESETQPVNRVAYNVGGQMATNNQSSTTAPATGTYNLQEIVPGSVWMERDVYLQGPIWAKIPETGAHFHPSPAMGGFGLKHPPPMMLIKNTPVPGNITSFSDVPVSSFITQYSTGQVTVEMEWELKKENSKRWNPEIQYTNNYNDPQFVDFAPDSTGEYRTTRPIGTRYLTRPL

SEQ ID NO: 828 - DNA, 2175 bp, Artificial Sequence
  Description of Artificial Sequence: Synthetic polynucleotide
atgtcttttgttgatcaccctccagattggttggaagaagttggtgaaggtcttcgcgagtttttgggccttgaagcgggcccaccgaaaccaaaacccaatcagcagcatcaagatcaagcccgtggtcttgtgctgcctggttataactatctcggacccggaaacggtctcgatcgaggagagcctgtcaacagggcagacgaggtcgcgcgagagcacgacatctcgtacaacgagcagcttgaggcgggagacaacccctacctcaagtacaaccacgcggacgccgagtttcaggagaagctcgccgacgacacatccttcgggggaaacctcggaaaggcagtctttcaggccaagaaaagggttctcgaaccttttggcctggttgaagagggtgctaagacggcccctaccggaaagcggatagacgaccactttccaaaaagaaagaaggcccggaccgaagaggactccaagcctcccacctcgtcagacgccgaagctggacccagcggatcccagcagctgcaaatcccagcccaaccagcctcaagtttgggagctgatacaatgtctgcgggaggtggcggcccattgggcgacaataaccaaggtgccgatggagtgggcaatgcctcgggagattggcattgcgattccacgtggatgggggacagagtcgtcaccaagtccacccgaacctgggtgctgcccagctacaacaaccaccagtaccgagagatcaaaagcggctccgtcgacggaagcaacgccaacgcctactttggatacagcaccccctgggggtactttgactttaaccgcttccacagccactggagcccccgagactggcaaagactcatcaacaactactggggcttcagaccccggtccctcagagtcaaaatcttcaacattcaagtcaaagaggtcacggtgcaggactccgccaccaccatcgccaacaacctcacctccaccgtccaagtgtttacggacgacgactaccagctgccctacgtcgtcggcaacgggaccgagggatgcctgccggccttccctccgcaggtctttacgctgccgcagtacggttacgcgacgctgaaccgcgacaacacagaaaatcccaccgagaggagcagcttcttctgcctagagtactttcccagcaagatgctgagaacgggcaacaactttgagtttacctacaactttgaggaggtgcccttccactccagcttcgctcccagtcagaacctcttcaagctggccaacccgctggtggaccagtacttgtaccgcttcgtgagcacaaataacactggcggagtccagttcaacaagaacctggccgggagatacgccaacacctacaaaaactggttcccggggcccatgggccgaacccagggctggaacctgggctccggggtcaaccgcgccagtgtcagcgccttcgccacgaccaataggatggagctcgagggcgcgagttaccaggtgcccccgcagccgaacggcatgaccaacaacctccagggcagcaacacctatgccctggagaacactatgatcttcaacagccagccggcgaacccgggcaccaccgccacgtacctcgagggcaacatgctcatcaccagcgagagcgagacgcagccggtgaaccgcgtggcgtacaacgtcggcgggcagatggccaccaacaaccagagctccaccactgcccccgcgaccggcacgtacaacctccaggaaatcgtgcccggcagcgtgtggatggagagggacgtgtacctccaaggacccatctgggccaagatcccagagacgggggcgcactttcacccctctccggccatgggcggattcggactcaaacacccaccgcccatgatgctcatcaagaacacgcctgtgcccggaaatatcaccagcttctcggacgtgcccgtcagcagcttcatcacccagtacagcaccgggcaggtcaccgtggagatggagtgggagctcaagaaggaaaactccaagaggtggaacccagagatccagtacacaaacaactacaacgacccccagtttgtggactttgccccggacagcaccggggaatacagaaccaccagacctatcggaacccgataccttacccgacccctttaa

SEQ ID NO: 829 - protein, 724 aa, Artificial Sequence
  Description of Artificial Sequence: Synthetic polypeptide
MSFVDHPPDWLEEVGEGLREFLGLEAGPPKPKPNQQHQDQARGLVLPGYNYLGPGNGLDRGEPVNRADEVAREHDISYNEQLEAGDNPYLKYNHADAEFQEKLADDTSFGGNLGKAVFQAKKRVLEPFGLVEEGAKTAPTGKRIDDHFPKRKKARTEEDSKPPTSSDAEAGPSGSQQLQIPAQPASSLGADTMSAGGGGPLGDNNQGADGVGNASGDWHCDSTWMGDRVVTKSTRTWVLPSYNNHQYREIKSGSVDGSNANAYFGYSTPWGYFDFNRFHSHWSPRDWQRLINNYWGFRPRSLRVKIFNIQVKEVTVQDSATTIANNLTSTVQVFTDDDYQLPYVVGNGTEGCLPAFPPQVFTLPQYGYATLNRDNTENPTERSSFFCLEYFPSKMLRTGNNFEFTYNFEEVPFHSSFAPSQNLFKLANPLVDQYLYRFVSTNNTGGVQFNKNLAGRYANTYKNWFPGPMGRTQGWNLGSGVNRASVSAFATTNRMELEGASYQVPPQPNGMTNNLQGSNTYALENTMIFNSQPANPGTTATYLEGNMLITSESETQPVNRVAYNVGGQMATNNQSSTTAPATGTYNLQEIVPGSVWMERDVYLQGPIWAKIPETGAHFHPSPAMGGFGLKHPPPMMLIKNTPVPGNITSFSDVPVSSFITQYSTGQVTVEMEWELKKENSKRWNPEIQYTNNYNDPQFVDFAPDSTGEYRTTRPIGTRYLTRPL

SEQ ID NO: 830 - DNA, 2175 bp, Artificial Sequence
  Description of Artificial Sequence: Synthetic polynucleotide
atgtcttttgttgatcaccctccagattggttggaagaagttggtgaaggtcttcgcgagtttttgggccttgaagcgggcccaccgaaaccaaaacccaatcagcagcatcaagatcaagcccgtggtcttgtgctgcctggttataactatctcggacccggaaacggtctcgatcgaggagagcctgtcaacagggcagacgaggtcgcgcgagagcacgacatctcgtacaacgagcagcttgaggcgggagacaacccctacctcaagtacaaccacgcggacgccgagtttcaggagaagctcgccgacgacacatccttcgggggaaacctcggaaaggcagtctttcaggccaagaaaagggttctcgaaccttttggcctggttgaagagggtgctaagacggcccctaccggaaagcggatagacgaccactttccaaaaagaaagaaggcccggaccgaagaggactccaagccttccacctcgtcagacgccgaagctggacccagcggatcccagcagccgcaaatcccagcccaaccagcctcaagtttgggagctgatacaatgtctgcgggaggtggcggcccattgggcgacaataaccaaggtgccgatggagtgggcaatgcctcgggagattggcattgcgattccacgtggatgggggacagagtcgtcaccaagtccacccgaacctgggtgctgcccagctacaacaaccaccagtaccgagagatcaaaagcggctccgtcgacggaagcaacgccaacgcctactttggatacagcaccccctgggggtactttgactttaaccgcttccacagccactggagcccccgagactggcaaagactcatcaacaactactggggcttcagaccccggtccctcagagtcaaaatcttcaacattcaagtcaaagaggtcacggtgcaggactccaccaccaccatcgccaacaacctcacctccaccgtccaagtgtttacggacgacgactaccagctgccctacgtcgtcggcaacgggaccgagggatgcctgccggccttccctccgcaggtctttacgctgccgcagtacggttacgcgacgctgaaccgcgacaacacagaaaatcccaccgagaggagcagcttcttctgcctagagtactttcccagcaagatgctgagaacgggcaacaactttgagtttacctacaactttgaggaggtgcccttccactccagcttcgctcccagtcagaacctcttcaagctggccaacccgctggtggaccagtacttgtaccgcttcgtgagcacaaataacactggcggagtccagttcaacaagaacctggccgggagatacgccaacacctacaaaaactggttcccggggcccatgggccgaacccagggctggaacctgggctccggggtcaaccgcgccagtgtcagcgccttcgccacgaccaataggatggagctcgagggcgcgagttaccaggtgcccccgcagccgaacggcatgaccaacaacctccagggcagcaacacctatgccctggagaacactatgatcttcaacagccagccggcgaacccgggcaccaccgccacgtacctcgagggcaacatgctcatcaccagcgagagcgagacgcagccggtgaaccgcgtggcgtacaacgtcggcgggcagatggccaccaacaaccagagctccaccactgcccccgcgaccggcacgtacaacctccaggaaatcgtgcccggcagcgtgtggatggagagggacgtgtacctccaaggacccatctgggccaagatcccagagacgggggcgcactttcacccctctccggccatgggcggattcggactcaaacacccaccgcccatgatgctcatcaagaacacgcctgcgcccggaaatatcaccagcttctcggacgtgcccgtcagcagcttcatcacccagtacagcaccgggcaggtcaccgtggagatggagtgggagctcaagaaggaaaactccaagaggtggaacccagagatccagtacacaaacaactacaacgacccccagtttgtggactttgccccggacagcaccggggaatacagaaccaccagacctatcggaacccgataccttacccgacccctttaa

SEQ ID NO: 831 - protein, 724 aa, Artificial Sequence
  Description of Artificial Sequence: Synthetic polypeptide
MSFVDHPPDWLEEVGEGLREFLGLEAGPPKPKPNQQHQDQARGLVLPGYNYLGPGNGLDRGEPVNRADEVAREHDISYNEQLEAGDNPYLKYNHADAEFQEKLADDTSFGGNLGKAVFQAKKRVLEPFGLVEEGAKTAPTGKRIDDHFPKRKKARTEEDSKPSTSSDAEAGPSGSQQPQIPAQPASSLGADTMSAGGGGPLGDNNQGADGVGNASGDWHCDSTWMGDRVVTKSTRTWVLPSYNNHQYREIKSGSVDGSNANAYFGYSTPWGYFDFNRFHSHWSPRDWQRLINNYWGFRPRSLRVKIFNIQVKEVTVQDSTTTIANNLTSTVQVFTDDDYQLPYVVGNGTEGCLPAFPPQVFTLPQYGYATLNRDNTENPTERSSFFCLEYFPSKMLRTGNNFEFTYNFEEVPFHSSFAPSQNLFKLANPLVDQYLYRFVSTNNTGGVQFNKNLAGRYANTYKNWFPGPMGRTQGWNLGSGVNRASVSAFATTNRMELEGASYQVPPQPNGMTNNLQGSNTYALENTMIFNSQPANPGTTATYLEGNMLITSESETQPVNRVAYNVGGQMATNNQSSTTAPATGTYNLQEIVPGSVWMERDVYLQGPIWAKIPETGAHFHPSPAMGGFGLKHPPPMMLIKNTPAPGNITSFSDVPVSSFITQYSTGQVTVEMEWELKKENSKRWNPEIQYTNNYNDPQFVDFAPDSTGEYRTTRPIGTRYLTRPL

SEQ ID NO: 832 - DNA, 2175 bp, Artificial Sequence
  Description of Artificial Sequence: Synthetic polynucleotide
atgtcttttgttgatcaccctccagattggttggaagaagttggtgaaggtcttcgcgagtttttgggccttgaagcgggcccaccgaaaccaaaacccaatcagcagcatcaagatcaagcccgtggtcttgtgctgcctggttataactatctcggacccggaaacggtctcgatcgaggagagcctgtcaacagggcagacgaggtcgcgcgagagcacgacatctcgtacaacgagcagcttgaggcgggagacaacccctacctcaagtacaaccacgcggacgccgagtttcaggagaagctcgccgacgacacatccttcgggggaaacctcggaaaggcagtctttcaggccaagaaaagggttctcgaaccttttggcctggttgaagagggtgctaagacggcccctaccggaaagcggatagacgaccactttccaaaaagaaagaaggcccggaccgaagaggactccaagcctcccacctcgtcagacgccgaagctggacccagcggatcccagcagctgcaaatcccagcccaaccagcctcaagtttgggagctgatacaatgtctgcgggaggtggcggcccattgggcgacaataaccaaggtgccgatggagtgggcaatgcctcgggagattggcattgcgattccacgtggatgggggacagagtcgtcaccaagtccacccgaacctgggtgctgcccagctacaacaaccaccagtaccgagagatcaaaagcggctccgtcgacggaagcaacgccaacgcctactttggatacagcaccccctgggggtactttgactttaaccgcttccacagccactggagcccccgagactggcaaagactcatcaacaactactggggcttcagaccccggtccctcagagtcaaaatcttcaacattcaagtcaaagaggtcacggtgcaggactccaccaccaccatcgccaacaacctcacctccaccgtccaagtgtttacggacgacgactaccagctgccctacgtcgtcggcaacgggaccgagggatgcctgccggccttccctccgcaggtctttacgctgccgcagtacggttacgcgacgctgaaccgcgacaacacagaaaatcccaccgagaggagcagcttcttctgcctagagtactttcccagcaagatgctgagaacgggcaacaactttgagtttacctacaactttgaggaggtgcccttccactccagcttcgctcccagtcagaacctcttcaagctggccaacccgctggtggaccagtacttgtaccgcttcgtgagcacaaataacactggcggagtccagttcaacaagaacctggccgggagatacgccaacacctacaaaaactggttcccggggcccatgggccgaacccagggctggaacctgggctccggggtcaaccgcgccagtgtcagcgccttcgccacgaccaataggatggagctcgagggcgcgagttaccaggtgcccccgcagccgaacggcatgaccaacaacctccagggcagcaacacctatgccctggagaacactatgatcttcaacagccagccggcgaacccgggcaccaccgccacgtacctcgagggcaacatgctcatcaccagcgagagcgagacgcagccggtgaaccgcgtggcgtacaacgtcggcgggcagatggccaccaacaaccagagctccaccactgcccccgcgaccggcacgtacaacctccaggaaatcgtgcccggcagcgtgtggatggagagggacgtgtacctccaaggacccatctgggccaagatcccagagacgggggcgcactttcacccctctccggccatgggcggattcggactcaaacacccaccgcccatgatgctcatcaagaacacgcctgtgcccggaaatatcaccagcttctcggacgtgcccgtcagcagcttcatcacccagtacagcaccgggcaggtcaccgtggagatggagtgggagctcaagaaggaaaactccaagaggtggaacccagagatccagtacacaaacaactacaacgacccccagtttgtggactttgccccggacagcaccggggaatacagaaccaccagacctatcggaacccgataccttacccgacccctttaa

SEQ ID NO: 833 - protein, 724 aa, Artificial Sequence
  Description of Artificial Sequence: Synthetic polypeptide
MSFVDHPPDWLEEVGEGLREFLGLEAGPPKPKPNQQHQDQARGLVLPGYNYLGPGNGLDRGEPVNRADEVAREHDISYNEQLEAGDNPYLKYNHADAEFQEKLADDTSFGGNLGKAVFQAKKRVLEPFGLVEEGAKTAPTGKRIDDHFPKRKKARTEEDSKPPTSSDAEAGPSGSQQLQIPAQPASSLGADTMSAGGGGPLGDNNQGADGVGNASGDWHCDSTWMGDRVVTKSTRTWVLPSYNNHQYREIKSGSVDGSNANAYFGYSTPWGYFDFNRFHSHWSPRDWQRLINNYWGFRPRSLRVKIFNIQVKEVTVQDSTTTIANNLTSTVQVFTDDDYQLPYVVGNGTEGCLPAFPPQVFTLPQYGYATLNRDNTENPTERSSFFCLEYFPSKMLRTGNNFEFTYNFEEVPFHSSFAPSQNLFKLANPLVDQYLYRFVSTNNTGGVQFNKNLAGRYANTYKNWFPGPMGRTQGWNLGSGVNRASVSAFATTNRMELEGASYQVPPQPNGMTNNLQGSNTYALENTMIFNSQPANPGTTATYLEGNMLITSESETQPVNRVAYNVGGQMATNNQSSTTAPATGTYNLQEIVPGSVWMERDVYLQGPIWAKIPETGAHFHPSPAMGGFGLKHPPPMMLIKNTPVPGNITSFSDVPVSSFITQYSTGQVTVEMEWELKKENSKRWNPEIQYTNNYNDPQFVDFAPDSTGEYRTTRPIGTRYLTRPL

SEQ ID NO: 834 - DNA, 2175 bp, Artificial Sequence
  Description of Artificial Sequence: Synthetic polynucleotide
atgtcttttgttgatcaccctccagattggttggaagaagttggtgaaggtcttcgcgagtttttgggccttgaagcgggcccaccgaaaccaaaacccaatcagcagcatcaagatcaagcccgtggtcttgtgctgcctggttataactatctcggacccggaaacggtctcgatcgaggagagcctgtcaacagggcagacgaggtcgcgcgagagcacgacatctcgtacaacgagcagcttgaggcgggagacaacccctacctcaagtacaaccacgcggacgccgagtttcaggagaagctcgccgacgacacatccttcgggggaaacctcggaaaggcagtctttcaggccaagaaaagggttctcgaaccttttggcctggttgaagagggtgctaagacggcccctaccggaaagcggatagacgaccactttccaaaaagaaagaaggcccggaccgaagaggactccaagcctcccacctcgtcagacgccgaagctggacccagcggatcccagcagctgcaaatcccagcccaaccagcctcaagtttgggagctgatacaatgtctgcgggaggtggcggcccattgggcgacaataaccaaggtgccgatggagtgggcaatgcctcgggagattggcattgcgattccacgtggatgggggacagagtcgtcaccaagtccacccgaacctgggtgccgcccagctacaacaaccaccagtaccgagagatcaaaagcggctccgtcgacggaagcaacgccaacgcctactttggatacagcaccccctgggggtactttgactttaaccgcttccacagccactggagcccccgagactggcaaagactcatcaacaactactggggcttcagaccccggtccctcagagtcaaaatcttcaacattcaagtcaaagaggtcacggtgcaggactccaccaccaccatcgccaacaacctcacctccaccgtccaagtgtttacggacgacgactaccagctgccctacgtcgtcggcaacgggaccgagggatgcctgccggccttccctccgcaggtctttacgctgccgcagtacggttacgcgacgctgaaccgcgacaacacagaaaatcccaccgagaggagcagcttcttctgcctagagtactttcccagcaagatgctgagaacgggcaacaactttgagtttacctacaactttgaggaggtgcccttccactccagcttcgctcccagtcagaacctcttcaagctggccaacccgctggtggaccagtacttgtaccgcttcgtgagcacaaataacactggcggagtccagttcaacaagaacctggccgggagatacgccaacacctacaaaaactggttcccggggcccatgggccgaacccagggctggaacctgggctccggggtcaaccgcgccagtgtcagcgccttcgccacgaccaataggatggagctcgagggcgcgagttaccaggtgcccccgcagccgaacggcatgaccaacaacctccagggcagcaacacctatgccctggagaacactatgatcttcaacagccagccggcgaacccgggcaccaccgccacgtacctcgagggcaacatgctcatcaccagcgagagcgagacgcagccggtgaaccgcgtggcgtacaacgtcggcgggcagatggccaccaacaaccagagctccaccactgcccccgcgaccggcacgtacaacctccaggaaatcgtgcccggcagcgtgtggatggagagggacgtgtacctccaaggacccatctgggccaagatcccagagacgggggcgcactttcacccctctccggccatgggcggattcggactcaaacacccaccgcccatgatgctcatcaagaacacgcctgtgcccggaaatatcaccagcttctcggacgtgcccgtcagcagcttcatcacccagtacagcaccgggcaggtcgccgtggagatggagtgggagctcaagaaggaaaactccaagaggtggaacccagagatccagtacacaaacaactacaacgacccccagtttgtggactttgccccggacagcaccggggaatacagaaccaccagacctatcggaacccgataccttacccgacccctttaa

SEQ ID NO: 835 - protein, 724 aa, Artificial Sequence
  Description of Artificial Sequence: Synthetic polypeptide
MSFVDHPPDWLEEVGEGLREFLGLEAGPPKPKPNQQHQDQARGLVLPGYNYLGPGNGLDRGEPVNRADEVAREHDISYNEQLEAGDNPYLKYNHADAEFQEKLADDTSFGGNLGKAVFQAKKRVLEPFGLVEEGAKTAPTGKRIDDHFPKRKKARTEEDSKPPTSSDAEAGPSGSQQLQIPAQPASSLGADTMSAGGGGPLGDNNQGADGVGNASGDWHCDSTWMGDRVVTKSTRTWVPPSYNNHQYREIKSGSVDGSNANAYFGYSTPWGYFDFNRFHSHWSPRDWQRLINNYWGFRPRSLRVKIFNIQVKEVTVQDSTTTIANNLTSTVQVFTDDDYQLPYVVGNGTEGCLPAFPPQVFTLPQYGYATLNRDNTENPTERSSFFCLEYFPSKMLRTGNNFEFTYNFEEVPFHSSFAPSQNLFKLANPLVDQYLYRFVSTNNTGGVQFNKNLAGRYANTYKNWFPGPMGRTQGWNLGSGVNRASVSAFATTNRMELEGASYQVPPQPNGMTNNLQGSNTYALENTMIFNSQPANPGTTATYLEGNMLITSESETQPVNRVAYNVGGQMATNNQSSTTAPATGTYNLQEIVPGSVWMERDVYLQGPIWAKIPETGAHFHPSPAMGGFGLKHPPPMMLIKNTPVPGNITSFSDVPVSSFITQYSTGQVAVEMEWELKKENSKRWNPEIQYTNNYNDPQFVDFAPDSTGEYRTTRPIGTRYLTRPL

SEQ ID NO: 836 - DNA, 2175 bp, Artificial Sequence
  Description of Artificial Sequence: Synthetic polynucleotide
atgtcttttgttgatcaccctccagattggttggaagaagttggtgaaggtcttcgcgagtttttgggccttgaagcgggcccaccgaaaccaaaacccaatcagcagcatcaagatcaagcccgtggtcttgtgctgcctggttataactatctcggacccggaaacggtctcgatcgaggagagcctgtcaacagggcagacgaggtcgcgcgagagcacgacatctcgtacaacgagcagcttgaggcgggagacaacccctacctcaagtacaaccacgcggacgccgagtttcaggagaagctcgccgacgacacatccttcgggggaaacctcggaaaggcagtctttcaggccaagaaaagggttctcgaaccttttggcctggttgaagagggtgctaagacggcccctaccggaaagcggatagacgaccactttccaaaaagaaagaaggcccggaccgaagaggactccaagccttccacctcgtcagacgccgaagctggacccagcggatcccagcagctgcaaatcccagcccaaccagcctcaagtttgggagctgatacaatgtctgcgggaggtggcggcccattgggcgacaataaccaaggtgccgatggagtgggcaatgcctcgggagattggcattgcgattccacgtggatgggggacagagtcgtcaccaagtccacccgaacctgggtgctgcccagctacaacaaccaccagtaccgagagatcaaaagcggctccgtcgacggaagcaacgccaacgcctactttggatacagcaccccctgggggtactttgactttaaccgcttccacagccactggagcccccgagactggcaaagactcatcaacaactactggggcttcagaccccggtccctcagagtcaaaatcttcaacattcaagtcaaagaggtcacggtgcaggactccaccaccaccatcgccaacaacctcacctccaccgtccaagtgtttacggacgacgactaccagctgccctacgtcgtcggcaacgggaccgagggatgcctgccggccttccctccgcaggtctttacgctgccgcagtacggttacgcgacgctgaaccgcgacaacacagaaaatcccaccgagaggagcagcttcttctgcctagagtactttcccagcaagatgctgagaacgggcaacaactttgagtttacctacaactttgaggaggtgcccttccactccagcttcgctcccagtcagaacctcttcaagctggccaacccgctggtggaccagtacttgtaccgcttcgtgagcacaaataacactggcggagtccagttcaacaagaacctggccgggagatacgccaacacctacaaaaactggttcccggggcccatgggccgaacccagggctggaacctgggctccggggtcaaccgcgccagtgtcagcgccttcgccacgaccaataggatggagctcgagggcgcgagttaccaggtgcccccgcagccgaacggcatgaccaacaacctccagggcagcaacacctatgccctggagaacactatgatcttcaacagccagccggcgaacccgggcaccaccgccacgtacctcgagggcaacatgctcatcaccagcgagagcgagacgcagccggtgaaccgcgtggcgtacaacgtcggcgggcagatggccaccaacaaccagagctccaccactgcccccgcgaccggcacgtacaacctccaggaaatcgtgcccggcagcgtgtggatggagagggacgtgtacctccaaggacccatctgggccaagatcccagagacgggggcgcactttcacccctctccggccatgggcggattcggactcaaacacccaccgcccatgatgctcatcaagaacacgcctgcgcccggaaatatcaccagcttctcggacgtgcccgtcagcagcttcatcacccagtacagcaccgggcaggtcaccgtggagatggagtgggagctcaagaaggaaaactccaagaggtggaacccagagatccagtacacaaacaactacaacgacccccagtttgtggactttgccccggacagcaccggggaatacagaaccaccagacctatcggaacccgataccttacccgacccctttaa

SEQ ID NO: 837 - protein, 724 aa, Artificial Sequence
  Description of Artificial Sequence: Synthetic polypeptide
MSFVDHPPDWLEEVGEGLREFLGLEAGPPKPKPNQQHQDQARGLVLPGYNYLGPGNGLDRGEPVNRADEVAREHDISYNEQLEAGDNPYLKYNHADAEFQEKLADDTSFGGNLGKAVFQAKKRVLEPFGLVEEGAKTAPTGKRIDDHFPKRKKARTEEDSKPSTSSDAEAGPSGSQQLQIPAQPASSLGADTMSAGGGGPLGDNNQGADGVGNASGDWHCDSTWMGDRVVTKSTRTWVLPSYNNHQYREIKSGSVDGSNANAYFGYSTPWGYFDFNRFHSHWSPRDWQRLINNYWGFRPRSLRVKIFNIQVKEVTVQDSTTTIANNLTSTVQVFTDDDYQLPYVVGNGTEGCLPAFPPQVFTLPQYGYATLNRDNTENPTERSSFFCLEYFPSKMLRTGNNFEFTYNFEEVPFHSSFAPSQNLFKLANPLVDQYLYRFVSTNNTGGVQFNKNLAGRYANTYKNWFPGPMGRTQGWNLGSGVNRASVSAFATTNRMELEGASYQVPPQPNGMTNNLQGSNTYALENTMIFNSQPANPGTTATYLEGNMLITSESETQPVNRVAYNVGGQMATNNQSSTTAPATGTYNLQEIVPGSVWMERDVYLQGPIWAKIPETGAHFHPSPAMGGFGLKHPPPMMLIKNTPAPGNITSFSDVPVSSFITQYSTGQVTVEMEWELKKENSKRWNPEIQYTNNYNDPQFVDFAPDSTGEYRTTRPIGTRYLTRPL

SEQ ID NO: 838 - DNA, 2175 bp, Artificial Sequence
  Description of Artificial Sequence: Synthetic polynucleotide
atgtcttttgttgatcaccctccagattggttggaagaagttggtgaaggtcttcgcgagtttttgggccttgaagcgggcccaccgaaaccaaaacccaatcagcagcatcaagatcaagcccgtggtcttgtgctgcctggttataactatctcggacccggaaacggtctcgatcgaggagagcctgtcaacagggcagacgaggtcgcgcgagagcacgacatctcgtacaacgagcagcttgaggcgggagacaacccctacctcaagtacaaccacgcggacgccgagtttcaggagaagctcgccgacgacacatccttcgggggaaacctcggaaaggcagtctttcaggccaagaaaagggttctcgaaccttttggcctggctgaagagggtgctaagacggcccctaccggaaagcggatagacgaccactttccaaaaagaaagaaggcccggaccgaagaggactccaagccttccacctcgtcagacgccgaagctggacccagcggatcccagcagctgcaaatcccagcccaaccagcctcaagtttgggagctgatacaatgtctgcgggaggtggcggcccattgggcgacaataaccaaggtgccgatggagtgggcaatgcctcgggagattggcattgcgattccacgtggatgggggacagagtcgtcaccaagtccacccgaacctgggtgctgcccagctacaacaaccaccagtaccgagagatcaaaagcggctccgtcgacggaagcaacgccaacgcctactttggatacagcaccccctgggggtactttgactttaaccgcttccacagccactggagcccccgagactggcaaagactcatcaacaactactggggcttcagaccccggtccctcagagccaaaatcttcaacattcaagtcaaagaggtcacggtgcaggactccaccaccaccatcgccaacaacctcacctccaccgtccaagtgtttacggacgacgactaccagctgccctacgtcgtcggcaacgggaccgagggatgcctgccggccttccctccgcaggtctttacgctgccgcagtacggttacgcgacgctgaaccgcgacaacacagaaaatcccaccgagaggagcagcttcttctgcctagagtactttcccagcaagatgctgagaacgggcaacaaccttgagtttacctacaactttgaggaggtgcccttccactccagcttcgctcccagtcagaacctcttcaagctggccaacccgctggtggaccagtacttgtaccgcttcgtgagcacaaataacactggcggagtccagttcaacaagaacctggccgggagatacgccaacacctacaaaaactggttcccggggcccatgggccgaacccagggctggaacctgggctccggggtcaaccgcgccagtgtcagcgccttcgccacgaccaataggatggagctcgagggcgcgagttaccaggtgcccccgcagccgaacggcatgaccaacaacctccagggcagcaacacctatgccctggagaacactatgatcttcaacagccagccggcgaacccgggcaccaccgccacgtacctcgagggcaacatgctcatcaccagcgagagcgagacgcagccggtgaaccgcgtggtgcacaacgtcggcgggcagatggccaccaacaaccagagctccaccactgcccccgcgaccggcacgtacaacctccaggaaatcgtgcccggcagcgtgtggatggagagggacgtgtacctccaaggacccatctgggccaagatcccagagacgggggcgcactttcacccctctccggccatgggcggattcggactcaaacacccaccgcccatgatgctcatcaagaacacgcctgtgcccggaaatatcaccagcttctcggacgtgcccgtcagcagcttcatcacccagtacagcaccgggcaggtcaccgtggagatggagtgggagctcaagaaggaaaactccaagaggtggaacccggagatccagtacacaaacaactacaacgacccccagtttgtggactttgccccggacagcaccggggaatacagaaccaccagacctatcggaacccgataccttacccgacccctttaa

SEQ ID NO: 839 - protein, 724 aa, Artificial Sequence
  Description of Artificial Sequence: Synthetic polypeptide
MSFVDHPPDWLEEVGEGLREFLGLEAGPPKPKPNQQHQDQARGLVLPGYNYLGPGNGLDRGEPVNRADEVAREHDISYNEQLEAGDNPYLKYNHADAEFQEKLADDTSFGGNLGKAVFQAKKRVLEPFGLAEEGAKTAPTGKRIDDHFPKRKKARTEEDSKPSTSSDAEAGPSGSQQLQIPAQPASSLGADTMSAGGGGPLGDNNQGADGVGNASGDWHCDSTWMGDRVVTKSTRTWVLPSYNNHQYREIKSGSVDGSNANAYFGYSTPWGYFDFNRFHSHWSPRDWQRLINNYWGFRPRSLRAKIFNIQVKEVTVQDSTTTIANNLTSTVQVFTDDDYQLPYVVGNGTEGCLPAFPPQVFTLPQYGYATLNRDNTENPTERSSFFCLEYFPSKMLRTGNNLEFTYNFEEVPFHSSFAPSQNLFKLANPLVDQYLYRFVSTNNTGGVQFNKNLAGRYANTYKNWFPGPMGRTQGWNLGSGVNRASVSAFATTNRMELEGASYQVPPQPNGMTNNLQGSNTYALENTMIFNSQPANPGTTATYLEGNMLITSESETQPVNRVVHNVGGQMATNNQSSTTAPATGTYNLQEIVPGSVWMERDVYLQGPIWAKIPETGAHFHPSPAMGGFGLKHPPPMMLIKNTPVPGNITSFSDVPVSSFITQYSTGQVTVEMEWELKKENSKRWNPEIQYTNNYNDPQFVDFAPDSTGEYRTTRPIGTRYLTRPL

SEQ ID NO: 840 - DNA, 2175 bp, Artificial Sequence
  Description of Artificial Sequence: Synthetic polynucleotide
atgtcttttgttgatcaccctccagattggttggaagaagttggtgaaggtcttcgcgagtttttgggccttgaagcgggcccaccgaaaccaaaacccaatcagcagcatcaagatcaagcccgtggtcttgtgctgcctggttataactatctcggacccggaaacggtctcgatcgaggagagcctgtcaacagggcagacgaggtcgcgcgagagcacgacatctcgtacaacgagcagcttgaggcgggagacaacccctacctcaagtacaaccacgcggacgccgagtttcaggagaagctcgccgacgacacatccttcgggggaaacctcggaaaggcagtctttcaggccaagaaaagggttctcgaaccttttggcctggttgaagagggtgctaagacggcccctaccggaaagcggatagacgaccactttccaaaaagaaagaaggcccggaccgaagaggactccaagccttccacctcgtcagacgccgaagctggacccagcggatcccagcagctgcaaatcccagcccaaccagcctcaagtttgggagctgatacaatgtctgcgggaggtggcggcccattgggcgacaataaccaaggtgccgatggagtgggcaatgcctcgggagattggcattgcgattccacgtggatgggggacagagtcgtcaccaagtccacccgaacctgggtgctgcccagctacaacaaccaccagtaccgagagatcaaaagcggctccgtcgacggaggcaacgccaacgcctactttggatacagcaccccctgggggtactttgactttaaccgcttccacagccactggagcccccgggactggcaaagactcatcaacaactactggggcttcagaccccggtccctcagagtcaaaatcttcaacattcaagtcaaagaggtcacggtgcaggactccaccaccaccatcgccaacaacctcacctccaccgtccaagtgtttacggacgacgactaccagctgccctacgtcgtcggcaacgggaccgagggatgcctgccggccttccctccgcaggtctttacgctgccgcagtacggttacgcgacgctgaaccgcgacaacacagaaaatcccaccgagaggagcagcttcttctgcctagagtactttcccagcaagatgctgagaacgggcaacaactttgagtttacctacaactttgaggaggtgcccttccactccagcttcgctcccagtcagaacctcttcaagctggccaacccgctggtggaccagtacttgtaccgcttcgtgagcacaaataacactggcggagtccagttcaacaagaacctggccgggagatacgccaacacctacaaaaactggttcccggggcccatgggccgaacccagggctggaacctgggctccggggtcaaccgcgccagtgtcagcgccttcgccacgaccaataggatggagctcgagggcgcgagttaccaggtgcccccgcagccgaacggcatgaccaacaacctccagggcagcaacacctatgccctggagaacactatgatcttcaacagccagccggcgaacccgggcaccaccgccacgtacctcgagggcaacatgctcatcaccagcgagagcgagacgcagccggtgaaccgcgtggcgtacaacgtcggcgggcagatggccaccaacaaccagagctccaccactgcccccgcgaccggcacgtacaacctccaggaaatcgtgcccggcagcgtgtggatggagagggacgtgtacctccaaggacccatctgggccaagatcccagagacgggggcgcactttcacccctctccggccatgggcggattcggactcaaacacccaccgcccatgatgctcatcaagaacacgcctgcgcccggaaatatcaccagcttctcggacgtgcccgtcagcagcttcatcacccagtacagcaccgggcaggtcaccgtggagatggagtgggagctcaagaagggaaactccaagaggtggaacccagagatccagtacacaaacaactacaacgacccccagtttgtggactttgccccggacagcaccggggaatacagaaccaccagacctatcggaacccgataccttacccgacccctttaa

SEQ ID NO: 841 - protein, 724 aa, Artificial Sequence
  Description of Artificial Sequence: Synthetic polypeptide
MSFVDHPPDWLEEVGEGLREFLGLEAGPPKPKPNQQHQDQARGLVLPGYNYLGPGNGLDRGEPVNRADEVAREHDISYNEQLEAGDNPYLKYNHADAEFQEKLADDTSFGGNLGKAVFQAKKRVLEPFGLVEEGAKTAPTGKRIDDHFPKRKKARTEEDSKPSTSSDAEAGPSGSQQLQIPAQPASSLGADTMSAGGGGPLGDNNQGADGVGNASGDWHCDSTWMGDRVVTKSTRTWVLPSYNNHQYREIKSGSVDGGNANAYFGYSTPWGYFDFNRFHSHWSPRDWQRLINNYWGFRPRSLRVKIFNIQVKEVTVQDSTTTIANNLTSTVQVFTDDDYQLPYVVGNGTEGCLPAFPPQVFTLPQYGYATLNRDNTENPTERSSFFCLEYFPSKMLRTGNNFEFTYNFEEVPFHSSFAPSQNLFKLANPLVDQYLYRFVSTNNTGGVQFNKNLAGRYANTYKNWFPGPMGRTQGWNLGSGVNRASVSAFATTNRMELEGASYQVPPQPNGMTNNLQGSNTYALENTMIFNSQPANPGTTATYLEGNMLITSESETQPVNRVAYNVGGQMATNNQSSTTAPATGTYNLQEIVPGSVWMERDVYLQGPIWAKIPETGAHFHPSPAMGGFGLKHPPPMMLIKNTPAPGNITSFSDVPVSSFITQYSTGQVTVEMEWELKKGNSKRWNPEIQYTNNYNDPQFVDFAPDSTGEYRTTRPIGTRYLTRPL

SEQ ID NO: 842 - DNA, 2208 bp, Artificial Sequence
  Description of Artificial Sequence: Synthetic polynucleotide
atggctgccgatggttatcttccagattggctcgaggacaaccttagtgaaggaattcgcgagtggtgggctttgaaacctggagcccctcaacccaaggcaaatcaacaacatcaagacaacgctcgaggtcttgtgcttccgggttacaaataccttggacccggcaacggactcgacaagggggagccggtcaacgcagcagacgcggcggccctcgagcacgacaaggcctacgaccagcagctcaaggccggagacaacccgtacctcaagtacaaccacgccgacgccgagttccaggagcggctcaaagaagatacgtcttttgggggcaacctcgggcgagcagtcttccaggccaaaaagaggcttcttgaacctcttggtctggttgaggaagcggctaagacggctcctggaaagaagaggcctgtagagcagtctcctcaggaaccggactcctccgcgggtattggcaaatcgggtgcacagcccgctaaaaagagactcaatttcggtcagactggcgacacagagtcagtcccagaccctcaaccaatcggagaacctcccgcagccccctcaggtgtgggatctcttacaatggcttcaggtggtggcgcaccagtggcagacaataacgaaggtgccgatggagtgggtagttcctcgggaaattggcattgcgattcccaatggctgggggacagagtcatcaccaccagcacccgaacctgggccctgcccacctacaacaatcacctctacaagcaaatctccaacagcacatctggaggatcttcaaatgacaacgcctacttcggctacagcaccccctgggggtattttgacttcaacagattccactgccacttctcaccacgtgactggcagcgactcatcaacaacaactggggattccggcctaagcgactcaacttcaagctcttcaacattcaggtcaaagaggttacggacaacaatggagtcaagaccatcgccaataaccttaccagcacggtccaggtcttcacggactcagactatcagctcccgtacgtgctcgggtcggctcacgagggctgcctcccgccgttcccagcggacgttttcatgattcctcagtacgggtatctgacgcttaatgatggaagccaggccgtgggtcgttcgtccttttactgcctggaatatttcccgtcgcaaatgctaagaacgggtaacaacttccagttcagctacgagtttgagaacgtacctttccatagcagctacgctcacagccagagcctggaccgactaatgaatccactcatcgaccaatacttgtactatctctcaaagactattaacggttctggacagaatcaacaaacgctaaaattcagtgtggccggacccagcaacatggctgtccagggaagaaactacatacctggacccagctaccgacaacaacgtgtctcaaccactgtgactcaaaacaacaacagcgaatttgcttggcctggagcttcttcttgggctctcaatggacgtaatagcttgatgaatcctggacctgctatggccagccacaaagaaggagaggaccgtttctttcctttgtctggatctttaatttttggcaaacaaggaactggaagagacaacgtggatgcggacaaagtcatgataaccaacgaagaagaaattaaaactactaacccggtagcaacggagtcctatggacaagtggccacaaaccaccagagtgcccaagcacaggcgcagaccggctgggttcaaaaccaaggaatacttccgggtatggtttggcaggacagagatgtgtacctgcaaggacccatttgggccaaaattcctcacacggacggcaactttcacccttctccgctgatgggagggtttggaatgaagcacccgcctcctcagatcctcatcaaaaacacacctgtacctgcggatcctccaacggccttcaacaaggacaagctggactctttcatcacccagtattctactggccaagtcagcgtggagatcgagtgggagctgcagaaggaaaacagcaagcgctggaacccggtgatccagtacacttccaactattacaagtctaataatgttgaatttgctgttaatactgaaggtgtatatagtgaaccccgccccattggcaccagatacctgactcgtaatctg

SEQ ID NO: 843 - protein, 736 aa, Artificial Sequence
  Description of Artificial Sequence: Synthetic polypeptide
MAADGYLPDWLEDNLSEGIREWWALKPGAPQPKANQQHQDNARGLVLPGYKYLGPGNGLDKGEPVNAADAAALEHDKAYDQQLKAGDNPYLKYNHADAEFQERLKEDTSFGGNLGRAVFQAKKRLLEPLGLVEEAAKTAPGKKRPVEQSPQEPDSSAGIGKSGAQPAKKRLNFGQTGDTESVPDPQPIGEPPAAPSGVGSLTMASGGGAPVADNNEGADGVGSSSGNWHCDSQWLGDRVITTSTRTWALPTYNNHLYKQISNSTSGGSSNDNAYFGYSTPWGYFDFNRFHCHFSPRDWQRLINNNWGFRPKRLNFKLFNIQVKEVTDNNGVKTIANNLTSTVQVFTDSDYQLPYVLGSAHEGCLPPFPADVFMIPQYGYLTLNDGSQAVGRSSFYCLEYFPSQMLRTGNNFQFSYEFENVPFHSSYAHSQSLDRLMNPLIDQYLYYLSKTINGSGQNQQTLKFSVAGPSNMAVQGRNYIPGPSYRQQRVSTTVTQNNNSEFAWPGASSWALNGRNSLMNPGPAMASHKEGEDRFFPLSGSLIFGKQGTGRDNVDADKVMITNEEEIKTTNPVATESYGQVATNHQSAQAQAQTGWVQNQGILPGMVWQDRDVYLQGPIWAKIPHTDGNFHPSPLMGGFGMKHPPPQILIKNTPVPADPPTAFNKDKLDSFITQYSTGQVSVEIEWELQKENSKRWNPVIQYTSNYYKSNNVEFAVNTEGVYSEPRPIGTRYLTRNL

SEQ ID NO: 844 - protein, 736 aa, Artificial Sequence
  Description of Artificial Sequence: Synthetic polypeptide
MAADGYLPDWLEDNLSEGIREWWDLKPGAPKPKANQQKQDDGRGLVLPGYKYLGPFNGLDKGEPVNAADAAALEHDKAYDQQLKAGDNPYLRYNHADAEFQERLQEDTSFGGNLGRAVFQAKKRVLEPLGLVEEGAKTAPGKKRPVEQSPQEPDSSSGIGKTGQQPAKKRLNFGQTGDSESVPDPQPLGEPPATPAAVGPTTMASGGGAPMADNNEGADGVGNASGNWHCDSTWLGDRVITTSTRTWALPTYNNHLYKQISSTSTGASNDNHYFGYSTPWGYFDFNRFHCHFSPRDWQRLINNNWGFRPKRLNFKLFNIQVKEVTTNDGVTTIANNLTSTVQVFSDSEYQLPYVLGSAHQGCLPPFPADVFMIPQYGYLTLNNGSQAVGRSSFYCLEYFPSQMLRTGNNFTFSYTFEEVPFHSSYAHSQSLDRLMNPLIDQYLYYLNRTQNQSGSAQNKDLLFSRGSPAGMSVQPKNWLPGPCYRQQRVSKTKTDNNNSNFTWTGASKYNLNGRESIINPGTAVASHKDDEDKFFPMSGVMIFGKESAGASNTALDNVMITDEEEIKATNPVATERFGTVAVNFQSSSTDPATGDVHAMGALPGMVWQDRDVYLQGPIWAKIPHTDGHFHPSPLMGGFGLKNPPPQILIKNTPVPANPPAEFSATKFASFITQYSTGQVSVEIEWELQKENSKRWNPEVQYTSNYAKSANVDFTVDNNGLYTEPRPIGTRYLTRPL

SEQ ID NO: 845 - protein, 736 aa, Artificial Sequence
  Description of Artificial Sequence: Synthetic polypeptide
MAADGYLPDWLEDNLSEGIREWWDLKPGAPKPKANQQKQDDGRGLVLPGYKYLGPFNGLDKGEPVNAADAAALEHDKAYDQQLKAGDNPYLRYNHADAEFQERLQEDTSFGGNLGRAVFQAKKRVLEPFGLVEEGAKTAPGKKRPVEQSPQEPDSSSGIGKSGQQPAKKRLNFGQTGDSESVPDPQPLGEPPATPAALGPTTMASGGGAPMADNNEGADGVGNASGNWHCDSTWLGDRVITTSTRTWALPTYNNHLYKQISSASTGASNDNHYFGYSTPWGYFDFNRFHCHFSPRDWQRLINNNWGFRPKRLNFKLFNIQVKEVTTNDGVTTIANNLTSTVQVFSDSEYQLPYVLGSAHQGCLPPFPADVFMIPQYGYLTLNNGSKAVGRSSFYCLEYFPSQMLRTGNNFTFSYTFEEVPFHSSYAHSQSLDRLMNPLIDQYLYYLNRTQNQSGSAQNKDLLFSRGSPAGMSVQPKNWLPGPCYRQQRVSKTKTDNNNSNFTWTGASKYNLNGRESIINPGTAMASHKDDEDKFFPMSGVMIFGKESAGASNTALDNVMITDEEEIKATNPVATERFGTVAVNFQSSSTDPATGDVHVMGALPGMVWQDRDVYLQGPIWAKIPHTDGHFHPSPLMGGFGLKHPPPQILIKNTPVPANPPAEFSATKFASFITQYSTGQVSVEIEWELQKENSKRWNPEVQYTSNYAKSANVDFTVDNNGLYTEPRPIGTRYLTRPL

SEQ ID NO: 846 - DNA, 2211 bp, Artificial Sequence
  Description of Artificial Sequence: Synthetic polynucleotide
atggctgctgacggttatcttccagattggctcgaggacaacctttctgaaggcattcgtgagtggtgggctctgaaacctggagtccctcaacccaaagcgaaccaacaacaccaggacaaccgtcggggtcttgtgcttccgggttacaaatacctcggacccggtaacggactcgacaaaggagagccggtcaacgaggcggacgcggcagccctcgaacacgacaaagcttacgaccagcagctcaaggccggtgacaacccgtacctcaagtacaaccacgccgacgccgagtttcaggagcgtcttcaagaagatacgtcttttgggggcaaccttggcagagcagtcttccaggccaaaaagaggatccttgagcctcttggtctggttgaggaagcagctaaaacggctcctggaaagaagaggcctgtagatcagtctcctcaggaaccggactcatcatctggtgttggcaaatcgggcaaacagcctgccagaaaaagactaaatttcggtcagactggcgactcagagtcagtcccagaccctcaacctctcggagaaccaccagcagcccccacaagtttgggatctaatacaatggcttcaggcggtggcgcaccaatggcagacaataacgagggtgccgatggagtgggtaattcctcaggaaattggcattgcgattcccaatggctgggcgacagagtcatcaccaccagcaccagaacctgggccctgcccacttacaacaaccatctctacaagcaaatctccagccaatcaggagcttcaaacgacaaccactactttggctacagcaccccttgggggtattttgactttaacagattccactgccacttctcaccacgtgactggcagcgactcattaacaacaactggggattccggcccaagaaactcagcttcaagctcttcaacatccaagttaaagaggtcacgcagaacgatggcacgacgactattgccaataaccttaccagcacggttcaagtgtttacggactcggagtatcagctcccgtacgtgctcgggtcggcgcaccaaggctgtctcccgccgtttccagcggacgtcttcatggtccctcagtatggatacctcaccctgaacaacggaagtcaagcggtgggacgctcatccttttactgcctggagtacttcccttcgcagatgctaaggactggaaataacttccaattcagctataccttcgaggatgtaccttttcacagcagctacgctcacagccagagtttggatcgcttgatgaatcctcttattgatcagtatctgtactacctgaacagaacgcaaggaacaacctctggaacaaccaaccaatcacggctgctttttagccaggctgggcctcagtctatgtctttgcaggccagaaattggctacctgggccctgctaccggcaacagagactttcaaagactgctaacgacaacaacaacagtaactttccttggacagcggccagcaaatatcatctcaatggccgcgactcgctggtgaatccaggaccagctatggccagtcacaaggacgatgaagaaaaatttttccctatgcacggcaatctaatatttggcaaagaagggacaacggcaagtaacgcagaattagataatgtaatgattacggatgaagaagagattcgtaccaccaatcctgtggcaacagagcagtatggaactgtggcaaataacttgcagagctcaaatacagctcccacgactagaactgtcaatgatcagggggccttacctggcatggtgtggcaagatcgtgacgtgtaccttcaaggacctatctgggcaaagattcctcacacggatggacactttcatccttctcctctgatgggaggctttggactgaaacatccgcctcctcaaatcatgatcaaaaatactccggtaccggcaaatcctccgacgactttcagcccggccaagtttgcttcatttatcactcagtactccactggacaggtcagcgtggaaattgagtgggagctacagaaagaaaacagcaaacgttggaatccagagattcagtacacttccaactacaacaagtctgttaatgtggactttactgtagacactaatggtgtttatagtgaacctcgccctattggaacccggtatctcacacgaaacttgtaa

SEQ ID NO: 847 - protein, 736 aa, Artificial Sequence; identical to SEQ ID NO: 63
  Description of Artificial Sequence: Synthetic polypeptide

SEQ ID NO: 848 - DNA, 2205 bp, Artificial Sequence; identical to SEQ ID NO: 108
  Description of Artificial Sequence: Synthetic polynucleotide

SEQ ID NO: 849 - protein, 734 aa, Artificial Sequence; identical to SEQ ID NO: 81
  Description of Artificial Sequence: Synthetic polypeptide

SEQ ID NO: 850 - DNA, 2234 bp, Artificial Sequence
  Description of Artificial Sequence: Synthetic polynucleotide
atgtcttttgttgatcaccctccagattggttggaagaagttggtgaaggtcttcgcgagtttttgggccttgaagcgggcccaccgaaaccaaaacccaatcagcagcatcaagatcaagcccgtggtcttgtgctgcctggttataactatctcggacccggaaacggtctcgatcgaggagagcctgtcaacagggcagacgaggtcgcgcgagagcacgacatctcgtacaacgagcagcttgaggcgggagacaacccctacctcaagtacaaccacgcggacgccgagtttcaggagaagctcgccgacgacacatccttcgggggaaacctcggaaaggcagtctttcaggccaagaaaagggttctcgaaccttttggcctggttgaagagggtgctaagacggcccctaccggaaagcggatagacgaccactttccaaaaagaaagaaggctcggaccgaagaggactccaagccttccacctcgtcagacgccgaagctggacccagcggatcccagcagctgcaaatcccagcccaaccagcctcaagtttgggagctgatacaatgtctgcgggaggtggcggcccattgggcgacaataaccaaggtgccgatggagtgggcaatgcctcgggagattggcattgcgattccacgtggatgggggacagagtcgtcaccaagtccacccgaacctgggtgctgcccagctacaacaaccaccagtaccgagagatcaaaagcggctccgtcgacggaagcaacgccaacgcctactttggatacagcaccccctgggggtactttgactttaaccgcttccacagccactggagcccccgagactggcaaagactcatcaacaactactggggcttcagaccccggtccctcagagtcaaaatcttcaacattcaagtcaaagaggtcacggtgcaggactccaccaccaccatcgccaacaacctcacctccaccgtccaagtgtttacggacgacgactaccagctgccctacgtcgtcggcaacgggaccgagggatgcctgccggccttccctccgcaggtctttacgctgccgcagtacggttacgcgacgctgaaccgcgacaacacagaaaatcccaccgagaggagcagcttcttctgcctagagtactttcccagcaagatgctgagaacgggcaacaactttgagtttacctacaactttgaggaggtgcccttccactccagcttcgctcccagtcagaacctgttcaagctggccaacccgctggtggaccagtacttgtaccgcttcgtgagcacaaataacactggcggagtccagttcaacaagaacctggccgggagatacgccaacacctacaaaaactggttcccggggcccatgggccgaacccagggctggaacctgggctccggggtcaaccgcgccagtgtcagcgccttcgccacgaccaataggatggagctcgagggcgcgagttaccaggtgcccccgcagccgaacggcatgaccaacaacctccagggcagcaacacctatgccctggagaacactatgatcttcaacagccagccggcgaacccgggcaccaccgccacgtacctcgagggcaacatgctcatcaccagcgagagcgagacgcagccggtgaaccgcgtggcgtacaacgtcggcgggcagatggccaccaacaaccagagctccaccactgcccccgcgaccggcacgtacaacctccaggaaatcgtgcccggcagcgtgtggatggagagggacgtgtacctccaaggacccatctgggccaagatcccagagacgggggcgcactttcacccctctccggccatgggcggattcggactcaaacacccaccgcccatgatgctcatcaagaacacgcctgtgcccggaaatatcaccagcttctcggacgtgcccgtcagcagcttcatcacccagtacagcaccgggcaggtcaccgtggagatggagtgggagctcaagaaggaaaactccaagaggtggaacccagagatccagtacacaaacaactacaacgacccccagtttgtggactttgccccggacagcaccggggaatacagaaccaccagacctatcggaacccgataccttacccgacccctttaacccattcatgtcgcataccctcaataaaccgtgtattcgtgtcagtaaaatactgcctc

SEQ ID NO: 851 - protein, 723 aa, Artificial Sequence
  Description of Artificial Sequence: Synthetic polypeptide
MSFVDHPPDWLEEVGEGLREFLGLEAGPPKPKPNQQHQDQARGLVLPGYNYLGPGNGLDRGEPVNRADEVAREHDISYNEQLEAGDNPYLKYNHADAEFQEKLADDTSFGGNLGKAVFQAKKRVLEPFGLVEEGAKTAPTGKRIDDHFPKRKKARTEEDSKPSTSSDAEAGPSGSQQLQIPAQPASSLGADTMSAGGGPLGDNNQGADGVGNASGDWHCDSTWMGDRVVTKSTRTWVLPSYNNHQYREIKSGSVDGSNANAYFGYSTPWGYFDFNRFHSHWSPRDWQRLINNYWGFRPRSLRVKIFNIQVKEVTVQDSTTTIANNLTSTVQVFTDDDYQLPYVVGNGTEGCLPAFPPQVFTLPQYGYATLNRDNTENPTERSSFFCLEYFPSKMLRTGNNFEFTYNFEEVPFHSSFAPSQNLFKLANPLVDQYLYRFVSTNNTGGVQFNKNLAGRYANTYKNWFPGPMGRTQGWNLGSGVNRASVSAFATTNRMELEGASYQVPPQPNGMTNNLQGSNTYALENTMIFNSQPANPGTTATYLEGNMLITSESETQPVNRVAYNVGGQMATNNQSSTTAPATGTYNLQEIVPGSVWMERDVYLQGPIWAKIPETGAHFHPSPAMGGFGLKHPPPMMLIKNTPVPGNITSFSDVPVSSFITQYSTGQVTVEMEWELKKENSKRWNPEIQYTNNYNDPQFVDFAPDSTGEYRTTRPIGTRYLTRPL

SEQ ID NO: 852 - DNA, 2601 bp, Artificial Sequence
  Description of Artificial Sequence: Synthetic polynucleotide
ccatcgacgtcagacgcggaagcttcgatcaactacgcggacaggtaccaaaacaaatgttctcgtcacgtgggcatgaatctgatgctgtttccctgcagacaatgcgagagactgaatcagaattcaaatatctgcttcactcacggtgtcaaagactgtttagagtgctttcccgtgtcagaatctcaacccgtttctgtcgtcaaaaaggcgtatcagaaactgtgctacattcatcacatcatgggaaaggtgccagacgcttgcactgcttgcgacctggtcaatgtggacttggatgactgtgtttctgaacaataaatgacttaaaccaggtatgactgccgatggttatcttccagattggctcgaggacaaccttagtgaaggaattcgcgagtggtgggctttgaaacctggagcccctcaacccaaggcaaatcaacaacatcaagacaacgctcgaggtcttgtgcttccgggttacaaataccttggacccggcaacggactcgacaagggggagccggtcaacgcagcagacgcggcggccctcgagcacgacaaggcctacgaccagcagctcaaggccggagacaacccgtacctcaagtacaaccacgccgacgccgagttccaggagcggctcaaagaagatacgtcttttgggggcaacctcgggcgagcagtcttccaggccaaaaagaggcttcttgaacctcttggtctggttgaggaagcggctaagacggctcctggaaagaagaggcctgtagagcagtctcctcaggaaccggactcctccgcgggtattggcaaatcgggtgcacagcccgctaaaaagagactcaatttcggtcagactggcgacacagagtcagtcccagaccctcaaccaatcggagaacctcccgcagccccctcaggtgtgggatctcttacaatggcttcaggtggtggcgcaccagtggcagacaataacgaaggtgccgatggagtgggtagttcctcgggaaattggcattgcgattcccaatggctgggggacagagtcatcaccaccagcacccgaacctgggccctgcccacctacaacaatcacctctacaagcaaatctccaacagcacatctggaggatcttcaaatgacaacgcctacttcggctacagcaccccctgggggtattttgacttcaacagattccactgccacttctcaccacgtgactggcagcgactcatcaacaacaactggggattccggcctaagcaactcaacttcaagctcttcaacattcaggtcaaagaggttacggacaacaatggagtcaagaccatcgccaataaccttaccagcacggtccaggtcttcacggactcagactatcagctcccgtacgtgctcgggtcggctcacgagggctgcctcccgccgttcccagcggacgttttcatgattcctcagtacgggtatctgacgcttaatgatggaagccaggccgtgggtcgttcgtccttttactgcctggaatatttcccgtcgcaaatgctaagaacgggtaacaacttccagttcagctacgagtttgagaacgtacctttccatagcagctacgctcacagccaaagcctggaccgactaatgaatccactcatcgaccaatacttgtactatctctcaaagactattaacggttctggacagaatcaacaaacgctaaaattcagtgtggccggacccagcaacatggctgtccagggaagaaactacatacctggacccagctaccgacaacaacgtgtctcaaccactgtgactcaaaacaacaacagcgaatttgcttggcctggagcttcttcttgggctctcaatggacgtaatagcttgatgaatcctggacctgctatggccagccacaaagaaggagaggaccgtttctttcctttgtctggatctttaatttttggcaaacaaggaactggaagagacaacgtggatgcggacaaagtcatgataaccaacgaagaagaaattaaaactactaacccggtagcaacggagtcctatggacaagtggccacaaaccaccagagtgcccaagcacaggcgcagaccggctgggttcaaaaccaaggaatacttccgggtatggtttggcaggacagagatgtgtacctgcaaggacccatttgggccaaaattcctcacacggacggcaactttcacccttctccgctgatgggagggtttggaatgaagcacccgcctcctcagatcctcatcaaaaacacacctgtacctgcggatcctccaacggccttcaacaaggacaagctgaactctttcatcacccagtattctactggccaagtcagcgtggagatcgagtgggagctgcagaaggaaaacagcaagcgctggaacccggagatccagtacacttccaactattacaagtctaataatgttgaatttgctgttaatactgaaggtgtatatagtgaaccccgccccattggcaccagatacctgactcgtaatctgtaattgcttgttaatcaataaaccgtttaattcgtttcagttgaactgcggcc

SEQ ID NO: 853 - protein, 736 aa, Artificial Sequence
  Description of Artificial Sequence: Synthetic polypeptide
MTADGYLPDWLEDNLSEGIREWWALKPGAPQPKANQQHQDNARGLVLPGYKYLGPGNGLDKGEPVNAADAAALEHDKAYDQQLKAGDNPYLKYNHADAEFQERLKEDTSFGGNLGRAVFQAKKRLLEPLGLVEEAAKTAPGKKRPVEQSPQEPDSSAGIGKSGAQPAKKRLNFGQTGDTESVPDPQPIGEPPAAPSGVGSLTMASGGGAPVADNNEGADGVGSSSGNWHCDSQWLGDRVITTSTRTWALPTYNNHLYKQISNSTSGGSSNDNAYFGYSTPWGYFDFNRFHCHFSPRDWQRLINNNWGFRPKQLNFKLFNIQVKEVTDNNGVKTIANNLTSTVQVFTDSDYQLPYVLGSAHEGCLPPFPADVFMIPQYGYLTLNDGSQAVGRSSFYCLEYFPSQMLRTGNNFQFSYEFENVPFHSSYAHSQSLDRLMNPLIDQYLYYLSKTINGSGQNQQTLKFSVAGPSNMAVQGRNYIPGPSYRQQRVSTTVTQNNNSEFAWPGASSWALNGRNSLMNPGPAMASHKEGEDRFFPLSGSLIFGKQGTGRDNVDADKVMITNEEEIKTTNPVATESYGQVATNHQSAQAQAQTGWVQNQGILPGMVWQDRDVYLQGPIWAKIPHTDGNFHPSPLMGGFGMKHPPPQILIKNTPVPADPPTAFNKDKLNSFITQYSTGQVSVEIEWELQKENSKRWNPEIQYTSNYYKSNNVEFAVNTEGVYSEPRPIGTRYLTRNL

SEQ ID NO: 854 - DNA, 2601 bp, Artificial Sequence
  Description of Artificial Sequence: Synthetic polynucleotide
ccatcgacgtcagacgcggaagcttcgatcaactacgcggacaggtaccaaaacaaatgttctcgtcacgtgggcatgaatctgatgctgtttccctgcagacaatgcgagagactgaatcagaattcaaatatctgcttcactcacggtgtcaaagactgtttagagtgctttcccgtgtcagaatctcaacccgtttctgtcgtcaaaaaggcgtatcagaaactgtgctacattcatcacatcatgggaaaggtgccagacgcttgcactgcttgcgacctggtcaatgtggacttggatgactgtgtttctgaacaataaatgacttaaaccaggtatggctgccgatggttatcttccagattggctcgaggacaaccttagtgaaggaattcgcgagtggtgggctttgaaacctggagcccctcaacccaaggcaaatcaacaacatcaagacaacgctcgaggtcttgtgcttccgggttacaaataccttggacccggcaacggactcgacaagggggagccgatcaacgcagcagacgcggcggccctcgagcacgacaaggcctacgaccagcagctcaaggccggagacaacccgtacctcaagtacaaccacgccgacgccgagttccaggagcggctcaaagaagatacgtcttttgggggcaacctcgggcgagcagtcttccaggccaaaaagaggcttcttgaacctcttggtctggttgaggaagcggctaagacggctcctggaaagaagaggcctgtagagcagtctcctcaggaaccggactcctccgcgggtattggcaaatcgggtgcacagcccgctaaaaagagactcaatttcggtcagactggcgacacagagtcagtcccagaccctcaaccaatcggagaacctcccgcagccccctcaggtgtgggatctcttacaatggcttcaggtggtggcgcaccagtggcagacaataacgaaggtgccgatggagtgggtagttcctcgggaaattggcattgcgattcccaatggctgggggacagagtcatcaccaccagcacccgaacctgggccctgcccacctacaacaatcacctctacaagcaaatctccaacagcacatctggaggatcttcaaatgacaacgcctacttcggctacagcaccccctgggggtattttgacttcaacagattccactgccacttctcaccacgtgactggcagcgactcatcaacaacaactggggattccggcctaagcgactcaacttcaagctcttcaacattcaggtcaaagaggttacggacaacaatggagtcaagaccatcgccaataaccttaccagcacggtccaggtcttcacggactcagactatcagctcccgtacgtgctcgggtcggctcacgagggctgcctcccgccgttcccagcggacgttttcatgattcctcagtacgggtatctgacgcttaatgatggaagccaggccgtgggtcgttcgtccttttactgcctggaatatttcccgtcgcaaatgctaagaacgggtaacaacttccagttcagctacgagtttgagaacgtacctttccatagcagctacgctcacagccaaagcctggaccgactaatgaatccactcatcgaccaatacttgtactatctctcaaagactattaacggttctggacagaatcaacaaacgctaaaattcagtgtggccggacccagcaacatggctgtccagggaagaaactacatacctggacccagctaccgacaacaacgtgtctcaaccactgtgactcaaaacaacaacagcgaatttgcttggcctggagcttcttcttgggctctcaatggacgtaatagcttgatgaatcctggacctgctatggccagccacaaagaaggagaggaccgtttctttcctttgtctggatctttaatttttggcaaacaaggaactggaagagacaacgtggatgcggacaaagtcatgataaccaacgaagaagaaattaaaactactaacccggtagcaacggagtcctatggacaagtggccacaaaccaccagagtgcccaagcacaggcgcagaccggctgggttcaaaaccaaggaatacttccgggtatggtttggcaggacagagatgtgtacctgcaaggacccatttgggccaaaattcctcacacgtacggcaactttcacccttctccgctgatgggagggtttggaatgaagcacccgcctcctcagatcctcatcaaaaacacacctgtacctgcggatcctccaacggccttcaacaaggacaagctgaactctttcatcacccagtattctactggccaagtcagcgtggagatcgagtgggagctgcagaaggaaaacagcaagcgctggaacccggagatccagtacacttccaactattacaagtctaataatgttgaatttgctgttaatactgaaggtgtatatagtgaaccccgccccattggcaccagatacctgactcgtaatctgtaattgcttgttaatcaataaaccgtttaattcgtttcagttgaactgcggcc

SEQ ID NO: 855 - protein, 736 aa, Artificial Sequence
  Description of Artificial Sequence: Synthetic polypeptide
MAADGYLPDWLEDNLSEGIREWWALKPGAPQPKANQQHQDNARGLVLPGYKYLGPGNGLDKGEPINAADAAALEHDKAYDQQLKAGDNPYLKYNHADAEFQERLKEDTSFGGNLGRAVFQAKKRLLEPLGLVEEAAKTAPGKKRPVEQSPQEPDSSAGIGKSGAQPAKKRLNFGQTGDTESVPDPQPIGEPPAAPSGVGSLTMASGGGAPVADNNEGADGVGSSSGNWHCDSQWLGDRVITTSTRTWALPTYNNHLYKQISNSTSGGSSNDNAYFGYSTPWGYFDFNRFHCHFSPRDWQRLINNNWGFRPKRLNFKLFNIQVKEVTDNNGVKTIANNLTSTVQVFTDSDYQLPYVLGSAHEGCLPPFPADVFMIPQYGYLTLNDGSQAVGRSSFYCLEYFPSQMLRTGNNFQFSYEFENVPFHSSYAHSQSLDRLMNPLIDQYLYYLSKTINGSGQNQQTLKFSVAGPSNMAVQGRNYIPGPSYRQQRVSTTVTQNNNSEFAWPGASSWALNGRNSLMNPGPAMASHKEGEDRFFPLSGSLIFGKQGTGRDNVDADKVMITNEEEIKTTNPVATESYGQVATNHQSAQAQAQTGWVQNQGILPGMVWQDRDVYLQGPIWAKIPHTYGNFHPSPLMGGFGMKHPPPQILIKNTPVPADPPTAFNKDKLNSFITQYSTGQVSVEIEWELQKENSKRWNPEIQYTSNYYKSNNVEFAVNTEGVYSEPRPIGTRYLTRNL

SEQ ID NO: 856 - DNA, 2601 bp, Artificial Sequence
  Description of Artificial Sequence: Synthetic polynucleotide
ccatcgacgtcagacgcggaagcttcgatcaactacgcggacaggtaccaaaacaaatgttctcgccacgtgggcatgaatctgatgctgtttccctgcagacaatgcgagagactgaatcagaattcaaatatctgcttcactcacggtgtcaaagactgtttagagtgctttcccgtgtcagaatctcaacccgtttctgtcgtcaaaaaggcgtatcagaaactgtgctacattcatcacatcatgggaaaggtgccagacgcttgcactgcttgcgacctggtcaatgtggacttggatgactgtgtttctgaacaataaatgacttaaaccaggtatggctgccgatggttatcttccagattggctcgaggacaaccttagtgaaggaattcgcgagtggtgggctttgaaacctggagcccctcaacccaaggcaaatcaacaacatcaagacaacgctcgaggtcttgtgcttccgggttacaaataccttggacccggcaacggactcgacaagggggagccggtcaacgcagcagacgcggcggccctcgagcacgacaaggcctacgaccagcagctcaaggccggagacaacccgtacctcaagtacaaccacgccgacgccgagttccaggagcggctcaaagaagatacgtcttttgggggcaacctcgggcgagcagtcttccaggccaaaaagaggcttcttgaacctcttggtctggttgaggaagcggctaagacggctcctggaaagaagaggcctgtagagcagtctcctcaggaaccggactcctccgcgggtattggcaaatcgggtgcacagcccgctaaaaagagactcaatttcggtcagactggcgacacagagtcagtcccagaccctcaaccaatcggagaacctcccgctgccccctcaggtgtgggatctcttacaatggcttcaggtggtggcgcaccagtggcagacaataacgaaggtgccgatggagtgggtagttcctcgggaaattggcattgcgattcccaatggctgggggacagagtcatcaccaccagcacccgaacctgggccctgcccacctacaacaatcacctctacaagcaaatctccaacagcacatctggaggatcttcaaatgacaacgcctacttcggctacagcaccccctgggggtattttgacttcaacagattccactgccacttctcaccacatgactggcagcgactcatcaacaacaactggggattccggcctaagcgactcaacttcaagctcttcaacattcaggtcaaagaggttacggacaacaatggagtcaagaccatcgccaataaccttaccagcacggtccaggtcttcacggactcagactatcagctcccgtacgtgctcgggtcggctcacgagggctgcctcccgccgttcccagcggacgttttcatgattcctcagtacgggtatctgacgcttaatgatggaagccaggccgtgggtcgttcgtccttttactgcctggaatatttcccgtcgcaaatgctaagaacgggtaacaacttccagttcagctacgagtttgagaacgtacctttccatagcagctacgctcacagccaaagcctggaccgactaatgaatccactcatcgaccaatacttgtactatctctcaaagactattaacggttctggacagaatcaacaaacgctaaaattcaatgtggccggacccagcaacatggctgtccagggaagaaactacatacctggacccagctaccgacaacaacgtgtctcaaccactgtgactcaaaacaacaacagcgaatttgcctggcctagagcttcttcttgggctctcaatggacgtaatagcttgatgaatcctggacctgctatggccagccacaaagaaggagaggaccgtttctttcctttgtctggatctttaatttttggcaaacaaggaactggaagagacaacgtggatgcggacaaagtcatgataaccaacgaagaagaaattaaaactactaacccggtagcaacggagtcctatggacaagtggccacaaaccaccagagtgcccaagcacaggcgcagaccggctgggttcaaaaccaaggaatacttccgggtatggtttggcaggacagagatgtgtacctgcaaggacccatttgggccaaaattcctcacacggacggcaactttcacccttctccgctgatgggagggtttggaatgaagcacccgcctcctcagatcctcatcaaaaacacacctgtacctgcggatcctccaacggccttcaacaaggacaagctgaactctttcatcacccagtattctactggccaagtcagcatggagatcgagtgggagctgcagaaggaaaacagcaagcgctggaacccggagatccagtacacttccaactattacaagtctaataatgttgaatttgctgttaatactgaaggtgtatatagtgaaccccgccccattggcaccagatacctgactcgtaatctgtaattgcttgttaatcaataaaccgtttaattcgtttcagttgaactgcggcc

SEQ ID NO: 857 - protein, 736 aa, Artificial Sequence
  Description of Artificial Sequence: Synthetic polypeptide
MAADGYLPDWLEDNLSEGIREWWALKPGAPQPKANQQHQDNARGLVLPGYKYLGPGNGLDKGEPVNAADAAALEHDKAYDQQLKAGDNPYLKYNHADAEFQERLKEDTSFGGNLGRAVFQAKKRLLEPLGLVEEAAKTAPGKKRPVEQSPQEPDSSAGIGKSGAQPAKKRLNFGQTGDTESVPDPQPIGEPPAAPSGVGSLTMASGGGAPVADNNEGADGVGSSSGNWHCDSQWLGDRVITTSTRTWALPTYNNHLYKQISNSTSGGSSNDNAYFGYSTPWGYFDFNRFHCHFSPHDWQRLINNNWGFRPKRLNFKLFNIQVKEVTDNNGVKTIANNLTSTVQVFTDSDYQLPYVLGSAHEGCLPPFPADVFMIPQYGYLTLNDGSQAVGRSSFYCLEYFPSQMLRTGNNFQFSYEFENVPFHSSYAHSQSLDRLMNPLIDQYLYYLSKTINGSGQNQQTLKFNVAGPSNMAVQGRNYIPGPSYRQQRVSTTVTQNNNSEFAWPRASSWALNGRNSLMNPGPAMASHKEGEDRFFPLSGSLIFGKQGTGRDNVDADKVMITNEEEIKTTNPVATESYGQVATNHQSAQAQAQTGWVQNQGILPGMVWQDRDVYLQGPIWAKIPHTDGNFHPSPLMGGFGMKHPPPQILIKNTPVPADPPTAFNKDKLNSFITQYSTGQVSMEIEWELQKENSKRWNPEIQYTSNYYKSNNVEFAVNTEGVYSEPRPIGTRYLTRNL

SEQ ID NO: 858 - DNA, 2601 bp, Artificial Sequence
  Description of Artificial Sequence: Synthetic polynucleotide
ccatcgacgtcagacgcggaagcttcgatcaactacgcggacaggtaccaaaacaaatgttctcgtcacgtgggcatgaatctgatgctgtttccctgcagacaatgcgagagactgaatcagaattcaaatatctgcttcactcacggtgtcaaagactgtttagagtgctttcccgtgtcagaatctcaacccgtttctgtcgtcaaaaaggcgtatcagaaactgtgctacattcatcacatcatgggaaaggtgccagacgcttgcactgcttgcgacctggtcaatgtggacttggatgactgtgtttctgaacaataaatgacttaaaccaggtatggctgccgatggttatcttccagattggctcgaggacaaccttagtgaaggaattcgcgagtggtgggctttgaaacctggagcccctcaacccaaggcaaatcaacaacatcaagacaacgctcgaggtcttgtgcttccgggttacaaataccttggacccggcaacggactcgacaagggggagccggtcaacgcagcagacgcggcggccctcgagcacgacaaggcctacgaccagcagctcaaggccggagacaacccgtacctcaagtacaaccacgccgacgccgagttccaggagcggctcaaagaagatacgtcttttgggggcaacctcgggcgagcagtcttccaggccaaaaagaggcttcttgaacctcttggtctggttgaggaagcggctaagacggctcctggaaagaagaggcctgtagagcagtctcctcaggaaccggactcctccgcgggtattggcaaatcgggtgcacagcccgctaaaaagagactcaatttcggtcagactggcgacacagagtcagtcccagaccctcaaccaatcggagaacctcccgcagccccctcaggtgtgggatctcttacaatggcttcaggtggtggcgcaccagtggcagacaataacgaaggtgccgatggagtgggtagttcctcgggaaattggcattgcgattcccaatggctgggggacagagtcatcaccaccagcacccgaacctgggccctgcccacctacaacaatcacctctacaagcaaatctccaacagcacatctggaggatcttcaaatgacaacgcctacttcggctacagcaccccctgggggtattttgacttcaacagattccactgccacttctcaccacgtgactggcagcgactcatcaacaacaactggggattccggcctaagcgactcaacttcaagctcttcaacattcaggtcaaagaggttacggacaacaatggagtcaagaccatcgccaataaccttaccagcacggtccaggtcttcacggactcagactatcagctcccgtacgtgctcgggtcggctcacgagggctgcctcccgccgttcccagcggacgttttcatgattcctcagtacgggtatctgacgcttaatgatggaagccaggccgtgggtcgttcgtccttttactgcctggaatatttcccgtcgcaaatgctaagaacgggtaacaacttccagttcagctacgagtttgagaacgtacctttccatagcagctacgctcacagccaaagcctggaccgactaatgaatccactcatcgaccaatacttgtactatctctcaaagactattaacggttctggacagaatcaacaaacgctaaaattcagtgtggccggacccagcaacatggctgtccagggaagaaactacatacctggacccagctaccgacaacaacgtgtctcaaccactgtgactcaaaacaacaacagcgaatttgcttggcctagagcttcttcttgggctctcaatggacgtaatagcttgatgaatcctggacctgctatggccagccacaaagaaggagaggaccgtttctttcctttgtctggatctttaatttttggcaaacaaggaactggaagagacaacgtggatgcggacaaagtcatgataaccaacgaagaagaaattaaaactactaacccggtagcaacggagtcctatggacaagtggccacaaaccaccagagtgcccaagcacaggcgcagaccggctgggttcaaaaccaaggaatacttccgggtatggtttggcaggacagagatgtgtacctgcaaggacccatttgggccaaaattcctcacacggacggcaactttcacccttctccgctgatgggagggtttggaatgaagcacccgcctcctcagatcctcatcaaaaacacacctgtacctgcggatcctccaacggccttcaacaaggacaagctgaactctttcatcacccagtattctactggccaagtcagcgtggagatcgagtgggagctgcagaaggaaaacagcaagcgctggaacccggagatccagtacacttccaactattacaagtctaataatgttgaatttgctgttaatactgaaggtgtatatagtgaaccccgccccattggcaccagatacctgactcgtaatctgtaattgcttgttaatcaataaaccgtttaattcgtttcagttgaactgcggcc

SEQ ID NO: 859 - protein, 736 aa, Artificial Sequence
  Description of Artificial Sequence: Synthetic polypeptide
MAADGYLPDWLEDNLSEGIREWWALKPGAPQPKANQQHQDNARGLVLPGYKYLGPGNGLDKGEPVNAADAAALEHDKAYDQQLKAGDNPYLKYNHADAEFQERLKEDTSFGGNLGRAVFQAKKRLLEPLGLVEEAAKTAPGKKRPVEQSPQEPDSSAGIGKSGAQPAKKRLNFGQTGDTESVPDPQPIGEPPAAPSGVGSLTMASGGGAPVADNNEGADGVGSSSGNWHCDSQWLGDRVITTSTRTWALPTYNNHLYKQISNSTSGGSSNDNAYFGYSTPWGYFDFNRFHCHFSPRDWQRLINNNWGFRPKRLNFKLFNIQVKEVTDNNGVKTIANNLTSTVQVFTDSDYQLPYVLGSAHEGCLPPFPADVFMIPQYGYLTLNDGSQAVGRSSFYCLEYFPSQMLRTGNNFQFSYEFENVPFHSSYAHSQSLDRLMNPLIDQYLYYLSKTINGSGQNQQTLKFSVAGPSNMAVQGRNYIPGPSYRQQRVSTTVTQNNNSEFAWPRASSWALNGRNSLMNPGPAMASHKEGEDRFFPLSGSLIFGKQGTGRDNVDADKVMITNEEEIKTTNPVATESYGQVATNHQSAQAQAQTGWVQNQGILPGMVWQDRDVYLQGPIWAKIPHTDGNFHPSPLMGGFGMKHPPPQILIKNTPVPADPPTAFNKDKLNSFITQYSTGQVSVEIEWELQKENSKRWNPEIQYTSNYYKSNNVEFAVNTEGVYSEPRPIGTRYLTRNL

SEQ ID NO: 860 - DNA, 2601 bp, Artificial Sequence
  Description of Artificial Sequence: Synthetic polynucleotide
ccatcgacgtcagacgcggaagcttcgatcaactacgcggacaggtaccaaaacaaatgttctcgtcacgtgggcatgaatctgatgctgtttccctgcagacaatgcgagagactgaatcagaattcaaatatctgcttcactcacggtgtcaaagactgtttagagtgctttcccgtgtcagaatctcaacccgtttctgtcgtcaaaaaggcgtatcagaaactgtgctacattcatcacatcatgggaaaggtgccagacgcttgcactgcttgcgacctggtcaatgtggacttggatgactgtgtttctgaacaataaatgacttaaaccaggtatggctgccgatggttatcttccagattggctcgaggacaaccttagtgaaggaattcgcgagtggtgggctttgaaacctggagcccctcaacccaaggcaaatcaacaacatcaagacaacgctcgaggtcttgtgcttccgggttacaaataccttggacccggcaacggactcgacaagggggagccggtcaacgcagcagacgcggcggccctcgagcacgacaaggcctacgaccagcagctcaaggccggagacaacccgtacctcaagtacaaccacgccgacgccgagttccaggagcggctcaaagaagatacgtcttttgggggcaacctcgggcgagcagtcttccaggccaaaaagaggcttcttgaacctcttggtctggttgaggaagcggctaagacggctcctggaaagaagaggcctgtagagcagtctcctcaggaaccggactcctccgcgggtattggcaaatcgggtgcacagcccgctaaaaagagactcaatttcggtcagactggcgacacagagtcagtcccagaccctcaaccaatcggagaacctcccgcagccccctcaggtgtgggatctcttacaatggcttcaggtggtggcgcaccagtggcagacaataacgaaggtgccgatggagtgggtagttcctcgggaaattggcattgcgattcccaatggctgggggacagagtcatcaccaccagcacccgaacctgggccctgcccacctacaacaatcacctctacaagcaaatctccaacagcacatctggaggatcttcaaatgacaacgcctacttcggctacagcaccccctgggggtattttgacttcaacagattccactgccacttctcaccacgtgactggcagcgactcatcaacaacaactggggattccggcctaagcgactcaacttcaagctcttcaacattcaggtcaaagaggttacggacaacaatggagtcaagaccatcgccaataaccttaccagcacggtccaggtcttcacggactcagactatcagctcccgtacgtgctcgggtcggctcacgagggctgcctcccgccgttcccagcggacgttttcatgattcctcagtacgggtatctgacgcttaatgatggaagccaggccgtgggtcgttcgtccttttactgcctggaatatttcccgtcgcaaatgctaagaacgggtaacaacttccagttcagctacgagtttgagaacgtacctttccatagcagctacgctcacagccaaagcctggaccgactaatgaatccactcatcgaccaatacttgtactatctctcaaagactattaacggttctggacagaatcaacaaacgctaaaattcagtgtggccggacccagcaacatggctgtccagggaagaaactacatacctggacccagctaccgacaacaacgtgtctcaaccactgtgactcaaaacaacaacagcgaatttgcttggcctagagcttcttcttgggctctcaatggacgtaatagcttgatgaatcctggacctgctatggccagccacaaagaaggagaggaccgtttctttcctttgtctggatctttaatttttggcaaacaaggaactggaagagacaacgtggatgcggacaaagtcatgataaccaacgaagaagaaattaaaactactaacccggtagcaacggagtcctatggacaagtggccacaaaccaccagagtgcccaagcacaggcgcagaccggctgggttcaaaaccaaggaatacttccgggtatggtttggcaggacagagatgtgtacctgcaaggacccatttgggccaaaattcctcacacggacggcaactttcacccttctccgctgatgggagggtttggaatgaagcacccgcctcctcagatcctcatcaaaaacacacctgtacctgcggatcctccaacggccttcaacaaggacaagctgaactctttcatcacccagtattctactggccaagtcagcgtggagatcgagtgggagcggcagaaggaaaacagcaagcgctggaacccggagatccagtacacttccaactattacaagtctaataatgttgaatttgctgttaatactgaaggtgtatatagtgaaccccgccccattggcaccagatacctgactcgtaatctgtaattgcttgttaatcaataaaccgtttaattcgtttcagttgaactgcggcc

SEQ ID NO: 861 - protein, 736 aa, Artificial Sequence
  Description of Artificial Sequence: Synthetic polypeptide
MAADGYLPDWLEDNLSEGIREWWALKPGAPQPKANQQHQDNARGLVLPGYKYLGPGNGLDKGEPVNAADAAALEHDKAYDQQLKAGDNPYLKYNHADAEFQERLKEDTSFGGNLGRAVFQAKKRLLEPLGLVEEAAKTAPGKKRPVEQSPQEPDSSAGIGKSGAQPAKKRLNFGQTGDTESVPDPQPIGEPPAAPSGVGSLTMASGGGAPVADNNEGADGVGSSSGNWHCDSQWLGDRVITTSTRTWALPTYNNHLYKQISNSTSGGSSNDNAYFGYSTPWGYFDFNRFHCHFSPRDWQRLINNNWGFRPKRLNFKLFNIQVKEVTDNNGVKTIANNLTSTVQVFTDSDYQLPYVLGSAHEGCLPPFPADVFMIPQYGYLTLNDGSQAVGRSSFYCLEYFPSQMLRTGNNFQFSYEFENVPFHSSYAHSQSLDRLMNPLIDQYLYYLSKTINGSGQNQQTLKFSVAGPSNMAVQGRNYIPGPSYRQQRVSTTVTQNNNSEFAWPRASSWALNGRNSLMNPGPAMASHKEGEDRFFPLSGSLIFGKQGTGRDNVDADKVMITNEEEIKTTNPVATESYGQVATNHQSAQAQAQTGWVQNQGILPGMVWQDRDVYLQGPIWAKIPHTDGNFHPSPLMGGFGMKHPPPQILIKNTPVPADPPTAFNKDKLNSFITQYSTGQVSVEIEWERQKENSKRWNPEIQYTSNYYKSNNVEFAVNTEGVYSEPRPIGTRYLTRNL

SEQ ID NO: 862 - DNA, 2601 bp, Artificial Sequence
  Description of Artificial Sequence: Synthetic polynucleotide
ccatcgacgtcagacgcggaagcttcgatcaactacgcggacaggtaccaaaacaaatgttctcgtcacgtgggcatgaatctgatgctgtttccctgcagacaatgcgagagactgaatcagaattcaaatatctgcttcactcacggtgtcaaagactgtttagagtgctttcccgtgtcagaatctcaacccgtttctgtcgtcaaaaaggcgtatcagaaactgtgctacattcatcacatcatgggaaaggtgccagacgcttgcactgcttgcgacctggtcaatgtggacttggatgactgtgtttctgaacaataaatgacttaaaccaggtatggctgccgatggttatcttccagattggctcgaggacaaccttagtgaaggaattcgcgagtggtgggctttgaaacctggagcccctcaacccaaggcaaatcaacaacatcaagacaacgctcgaggtcttgtgcttccgggttacaaataccttggacccggcaacggactcgacaagggggagccggtcaacgcagcagacgcggcggccctcgagcacgacaaggcctacgaccagcagctcaaggccggagacaacccgtacctcaagtacaaccacgccgacgccgagttccaggagcggctcaaagaagatacgtcttttgggggcaacctcgggcgagcagtcttccaggccaaaaagaggcttcttgaacctcttggtctggttgaggaagcggctaagacggctcctggaaagaagaggcctgtagagcagtctcctcaggaaccggactcctccgcgggtattggcaaatcgggtgcacagcccgctaaaaagagactcaatttcggtcagactggcgacacagagtcagtcccagaccctcaaccaatcggagaacctcccgcagccccctcaggtgtgggatctcttacaatggcttcaggtggtggcgcaccagtggcagacaataacgaaggtgccgatggagtgggtagttcctcgggaaattggcattgcgattcccaatggctgggggacagagtcatcaccaccagcacccgaacctgggccctgcccacctacaacaatcacctctacaagcaaatctccaacagcacatctggaggatcttcaaatgacaacgcctacttcggctacagcaccccctgggggtattttgacttcaacagattccactgccacttctcaccacgtgactggcagcgactcatcaacaacaactggggattccggcctaagcgactcaacttcaagctcttcaacattcaggtcaaagaggttacggacaacaatggagtcaagaccatcgccaataaccttaccagcacggtccaggtcttcgcggactcagactatcagctcccgtacgtgctcgggtcggctcacgagggctgcctcccgccgttcccagcggacgttttcatgattcctcagtacgggtatctgacgcttaatgatggaagccaggccgtgggtcgttcgtccttttactgcctggaatatttcccgtcgcaaatgctaagaacgggtaacaacttccagttcagctacgagtttgagaacgtacctttccatagcagctacgctcacagccaaagcctggaccgactaatgaatccactcatcgaccaatacttgtactatctctcaaagactattaacggttctggacagaatcaacaaacgctaaaattcagtgtggccggacccagcaacatggctgtccagggaagaaactacatacctggacccagctaccgacaacaacgtgtctcaaccactgtgactcaaaacaacaacagcgaatttgcttggcctagagcttcttcttgggctctcaatggacgtaatagcttgatgaatcctggacctgctatggccagccacaaagaaggagaggaccgtttctttcctttgtctggatctttaatttttggcaaacaaggaactggaagagacaacgtggatgcggacaaagtcatgataaccaacgaagaagaaattaaaactactaacccggtagcaacggagtcctatggacaagtggccacaaaccaccagagtgcccaagcacaggcgcagaccggctgggttcaaaaccaaggaatacttccgggtatggtttggcaggacagagatgtgtacctgcaaggacccatttgggccaaaattcctcacacggacggcaactttcacccttctccgctgatgggagggtttggaatgaagcacccgcctcctcagatcctcatcaaaaacacacctgtacctgcggatcctccaacggccttcaacaaggacaagctgaactctttcatcacccagtattctactggccaagtcagcgtggagatcgagtgggagctgcagaaggaaaacagcaagcgctggaacccggagatccagtacacttccaactattacaagtctaataatgttgaatttgctgttaatactgaaggtgtatatagtgaaccccgccccattggcaccagatacctgactcgtaatctgtaattgcttgttaatcaataaaccgtttaattcgtttcagttgaactgcggcc

SEQ ID NO: 863 - protein, 736 aa, Artificial Sequence
  Description of Artificial Sequence: Synthetic polypeptide
MAADGYLPDWLEDNLSEGIREWWALKPGAPQPKANQQHQDNARGLVLPGYKYLGPGNGLDKGEPVNAADAAALEHDKAYDQQLKAGDNPYLKYNHADAEFQERLKEDTSFGGNLGRAVFQAKKRLLEPLGLVEEAAKTAPGKKRPVEQSPQEPDSSAGIGKSGAQPAKKRLNFGQTGDTESVPDPQPIGEPPAAPSGVGSLTMASGGGAPVADNNEGADGVGSSSGNWHCDSQWLGDRVITTSTRTWALPTYNNHLYKQISNSTSGGSSNDNAYFGYSTPWGYFDFNRFHCHFSPRDWQRLINNNWGFRPKRLNFKLFNIQVKEVTDNNGVKTIANNLTSTVQVFADSDYQLPYVLGSAHEGCLPPFPADVFMIPQYGYLTLNDGSQAVGRSSFYCLEYFPSQMLRTGNNFQFSYEFENVPFHSSYAHSQSLDRLMNPLIDQYLYYLSKTINGSGQNQQTLKFSVAGPSNMAVQGRNYIPGPSYRQQRVSTTVTQNNNSEFAWPRASSWALNGRNSLMNPGPAMASHKEGEDRFFPLSGSLIFGKQGTGRDNVDADKVMITNEEEIKTTNPVATESYGQVATNHQSAQAQAQTGWVQNQGILPGMVWQDRDVYLQGPIWAKIPHTDGNFHPSPLMGGFGMKHPPPQILIKNTPVPADPPTAFNKDKLNSFITQYSTGQVSVEIEWELQKENSKRWNPEIQYTSNYYKSNNVEFAVNTEGVYSEPRPIGTRYLTRNL

SEQ ID NO: 864 - DNA, 2601 bp, Artificial Sequence
  Description of Artificial Sequence: Synthetic polynucleotide
ccatcgacgtcagacgcggaagcttcgatcaactacgcggacaggtaccaaaacaaatgttctcgtcacgtgggcatgaatctgatgctgtttccctgcagacaatgcgagagactgaatcagaattcaaatatctgcttcactcacggtgtcaaagactgtttagagtgctttcccgtgtcagaatctcaacccgtttctgtcgtcaaaaaggcgtatcagaaactgtgctacattcatcacatcatgggaaaggtgccagacgcttgcactgcttgcgacctggtcaatgtggacttggatgactgtgtttctgaacaataaatgacttaaaccaggtatggctgccgatggttatcttccagattggctcgaggacaaccttagtgaaggaattcgcgagtggtgggctttgaaacctggagcccctcaacccaaggcaaatcaacaacatcaagacaacgctcgaggtcttgtgcttccgggttacaaataccttggacccggcaacggactcgacaagggggagccggtcaacgcagcagacgcggcggccctcgagcacgacaaggcctacgaccagcagctcaaggccggagacaacccgtacctcaagtacaaccacgccgacgccgagttccaggagcggctcaaagaagatacgtcttttgggggcaacctcgggcgagcagtcttccaggccaaaaagaggcttcttgaacctcttggtctggttgaggaagcggctaagacggctcctggaaagaagaggcctgtagagcagtctcctcaggaaccggactcctccgcgggtattggcaaatcgggtgcacagcccgctaaaaagagactcaatttcggtcagactggcgacacagagtcagtcccagaccctcaaccaatcggagaacctcccgcagccccctcaggtgtgggatctcttacaatggcttcaggtggtggcgcaccagtggcagacaataacgaaggtgccgatggagtgggtagttcctcgggaaattggcattgcgattcccaatggctgggggacagagtcatcaccaccagcacccgaacctgggccctgcccacctacaacaatcacctctacaagcaaatctccaacagcacatctggaggatcttcaaatgacaacgcctacttcggctacagcaccccctgggggtattttgacttcaacagattccactgccacttctcaccacgtgactggcagcgactcatcaacaacaactggggattccggcctaagcgactcaacttcaagctcttcaacattcaggtcaaagaggttacggacaacaatggagtcaagaccatcgccaataaccttaccagcacggtccaggtcttcacggactcagactatcagctcccgtacgtgctcgggtcggctcacgagggctgcctcccgccgttcccagcggacgttttcatgattcctcagtacgggtatctgacgcttaatgatggaagccaggccgtgggtcgttcgtccttttactgcctggaatatttcccgtcgcaaatgctaagaacgggtaacaacttccagttcagctacgagtttgagaacgtacctttccatagcagctacgctcacagccaaagcctggaccgactaatgaatccactcatcgaccaatacttgtactatctctcaaagactattaacggttctggacagaatcaacaaacgctaaaattcagtgtggccggacccagcaacatggctgtccagggaagaaactacatacctggacccagctaccgacaacaacgtgtctcaaccactgtgactcaaaacaacaacagcgaaattgcttggcctagagcttcttcttgggctctcaatggacgtaatagcttgatgaatcctggacctgctatggccagccacaaagaaggagaggaccgtttctttcctttgtctggatctttaatttttggcaaacaaggaactggaagagacaacgtggatgcggacaaagtcatgataaccaacgaagaagaaattaaaactactaacccagtagcaacggagtcctatggacaagtggccacaaaccaccagagtgcccaagcacaggcgcagaccggctgggttcaaaaccaaggaatacttccgggtatggtttggcaggacagagatgtgtacctgcaaggacccatttgggccaaaattcctcacacggacggcaactttcacccttctccgctgatgggagggtttggaatgaagcacccgcctcctcagatcctcatcaaaaacacacctgtacctgcggatcctccaacggccttcaacaaggacaagctgaactctttcatcacccagtattctactggccaagtcagcgtggagatcgagtgggagctgcagaaggaaaacagcaagcgctggaacccggagatccagtacacttccaactattgcaagtctaataatgttgaatttgctgttaatactgaaggtgtatatagtgaaccccgccccattggcaccagatacctgactcgtaatctgtaattgcttgttaatcaataaaccgtttaattcgtttcagttgaactgcggcc

SEQ ID NO: 865 - protein, 736 aa, Artificial Sequence
  Description of Artificial Sequence: Synthetic polypeptide
MAADGYLPDWLEDNLSEGIREWWALKPGAPQPKANQQHQDNARGLVLPGYKYLGPGNGLDKGEPVNAADAAALEHDKAYDQQLKAGDNPYLKYNHADAEFQERLKEDTSFGGNLGRAVFQAKKRLLEPLGLVEEAAKTAPGKKRPVEQSPQEPDSSAGIGKSGAQPAKKRLNFGQTGDTESVPDPQPIGEPPAAPSGVGSLTMASGGGAPVADNNEGADGVGSSSGNWHCDSQWLGDRVITTSTRTWALPTYNNHLYKQISNSTSGGSSNDNAYFGYSTPWGYFDFNRFHCHFSPRDWQRLINNNWGFRPKRLNFKLFNIQVKEVTDNNGVKTIANNLTSTVQVFTDSDYQLPYVLGSAHEGCLPPFPADVFMIPQYGYLTLNDGSQAVGRSSFYCLEYFPSQMLRTGNNFQFSYEFENVPFHSSYAHSQSLDRLMNPLIDQYLYYLSKTINGSGQNQQTLKFSVAGPSNMAVQGRNYIPGPSYRQQRVSTTVTQNNNSEIAWPRASSWALNGRNSLMNPGPAMASHKEGEDRFFPLSGSLIFGKQGTGRDNVDADKVMITNEEEIKTTNPVATESYGQVATNHQSAQAQAQTGWVQNQGILPGMVWQDRDVYLQGPIWAKIPHTDGNFHPSPLMGGFGMKHPPPQILIKNTPVPADPPTAFNKDKLNSFITQYSTGQVSVEIEWELQKENSKRWNPEIQYTSNYCKSNNVEFAVNTEGVYSEPRPIGTRYLTRNL

SEQ ID NO: 866 - DNA, 2601 bp, Artificial Sequence
  Description of Artificial Sequence: Synthetic polynucleotide
ccatcgacgtcagacgcggaagcttcgatcaactacgcggacaggtaccaaaacaaatgttctcgtcacgtgggcatgaatctgatgctgtttccctgcagacaatgcgagagactgaatcagaattcaaatatctgcttcactcacggtgtcaaagactgtttagagtgctttcccgtgtcagaatctcaacccgtttctgtcgtcaaaaaggcgtatcagaaactgtgctacattcatcacatcatgggaaaggtgccagacgcttgcactgcttgcgacctggtcaatgtggacttggatgtctgtgtttctgaacaataaatgacttaaaccaggtatggctgccgatggttatcttccagattggctcgaggacaaccttagtgaaggaattcgcgagtggtgggctttgaaacctggagcccctcaacccaaggcaaatcaacaacatcaagacaacgctcgaggtcttgtgcttccgggttacaaataccttggacccggcaacggactcgataagggggagccggtcaacgcagcagacgcggcggccctcgagcacgacaaggcctacgaccagcagctcaaggccggagacaacccgtacctcaagtacaaccacgccgacgccgagttccaggagcggctcaaagaagatacgtcttttgggggcaacctcgggcgagcagtcttccaggccaaaaagaggcttcttgaacctcttggtctggttgaggaagcggctaagacggctcctggaaagaagaggcctgtagagcagtctcctcaggaaccggactcctccgcgggtattggcaaatcgggtgcacagcccgctaaaaagagactcaatttcggtcagactggcgacacagagtcagtcccagaccctcaaccaatcggagaacctcccgcagccccctcaggtgtgggatctcttacaatggcttcaggtggtggcgcaccagtggcagacaataacgaaggtgccgatggagtgggtagttcctcgggaaattggcattgcgattcccaatggctgggggacagagtcatcaccaccagcacccgaacctgggccctgcccacctacaacaatcacctctacaagcaaatctccaacagcacatctggaggatcttcaaatgacaacgcctacttcggctacagcaccccctgggggtattttgacttcaacagattccactgccacttctcaccacgtgactggcagcgactcatcaacaacaactggggattccggcctaagcgactcaacttcaagctcttcaacattcaggtcaaagaggttacggacaacaatggagtcaagaccatcgccaataaccttaccagcacggtccaggtcttcacggactcagactatcagctcccgtacgtgctcgggtcggctcacgagggctgcctcccgccgttcccagcggacgttttcatgattcctcagtacgggtatctgacgcttaatgatggaagccaggccgtgggtcgttcgtccttttactgcctggaatatttcccgtcgcaaatgctaagaacgggtaacaacttccagttcagctacgagtttgagaacgtacctttccatagcagctacgctcacagccaaagcctggaccgactaatgaatccactcatcgaccaatacttgtactatctctcaaagactattaacggttctggacagaatcaacaaacgctaaaattcagtgtggccggacccagcaacatggctgtccagggaagaaactacatacctggacccagctaccgacaacaacgtgtctcaaccactgtgactcaaaacaacaacagcgaatttgcttggcctagagcttcttcttgggctctcaatggacgtaatagcttgatgaatcctggacctgctatggccagccacaaagaaggagaggaccgtttctttcctttgtctggatctttaatttttggcaaacaaggaactggaagagacaacgtggatgcggacaaagtcatgataaccaacgaagaagaaattaaaactactaacccggtagcaacggagtcctatggacaagtggccacaaaccaccagagtgcccaagcacaggcgcagaccggctgggttcaaaaccaaggaatacttccgggtatggtttggcaggacagagatgtgtacctgcaaggacccatttgggccaaaattcctcacacggacggcaactttcacccttctccgctgatgggagggtttggaatgaagcacccgcctcctcagatcctcatcaaaaacacacctgtacctgcggatcctccaacggccttcaacaaggacaagctgaactctttcatcacccagtattctactggccaagtcagcgtggagatcgagtgggagctgcagaaggaaaacagcaagcgctggaacccggagatccagtacacttccaactattacaagtctaataatgttgaatttgctgttaatactgaaggtgtatatagtgaaccccgccccattggcaccagatacctgactcgtaatctgtaattgcttgttaatcaataaaccgtttaattcgtttcagttgaactgcggcc

SEQ ID NO: 867 - protein, 736 aa, Artificial Sequence; identical to SEQ ID NO: 859
  Description of Artificial Sequence: Synthetic polypeptide

SEQ ID NO: 868 - DNA, 2601 bp, Artificial Sequence
  Description of Artificial Sequence: Synthetic polynucleotide
ccatcgacgtcagacgcggaagcttcgatcaactacgcggacaggtaccaaaacaaatgttctcgtcacgtgggcatgaatctgatgctgtttccctgcagacaatgcgagagactgaatcagaattcaaatatctgcttcactcacggtgtcaaagactgtttagagtgctttcccgtgtcagaatctcaacccgtttctgtcgtcaaaaaggcgtatcagaaactgtgctacattcatcacatcatgggaaaggtgccagacgcttgcactgcttgcgacctggtcaatgtggacttggatgactgtgtttctgaacaataaatgacttaaaccaggtatggctgccgatggttatcttccagattggctcgaggacaaccttagtgaaggaattcgcgagtggtgggctttgaaacctggagcccctcaacccaaggcaaatcaacaacatcaagacaacgctcgaggtcttgtgcttccgggttacaaataccttggacccggcaacggactcgacaagggggagccggtcaacgcagcagacgcggcggccctcgagcacgacaaggcctacgaccagcagctcaaggccggagacaacccgtacctcaagtacaaccacgccgacgccgagttccaggagcggctcaaagaagatacgtcttttgggggcaacctcgggcgagcagtcttccaggccaaaaagaggcttcttgaacctcttggtctggttgaggaagcggctaagacggctcctggaaagaagaggcctgtagagcagtctcctcaggaaccggactcctccgcgggtattggcaaatcgggtgcacagcccgctaaaaagagactcaatttcggtcagactggcgacacagagtcagtcccagaccctcaaccaatcggagaacctcccgcagccccctcaggtgtgggatctcttacaatggcttcaggtggtggcgcaccagtggcagacaataacgaaggtgccgatggagtgggtagttcctcgggaaattggcattgcgattcccaatggctgggggacagagtcatcaccaccagcacccgaacctgggccctgcccacctacaacaatcacctctacaagcaaatctccaacagcacatctggaggatcttcaaatgacaacgcctacttcggctacagcaccccctgggggtattttgacttcaacagattccactgccacttctcaccacgtgactggcagcgactcatcaacaacaactggggattccggcctaagcgactcaacttcaagctcttcaacattcaggtcaaagaggttacggacaacaatggagtcaagaccatcgccaataaccttaccagcacggtccaggtcttcacggactcagactatcagctcccgtacgtgctcgggtcggctcacgagggctgcctcccgccgttcccagcggacgttttcatgattcctcagtacgggtatctgacgcttaatgatggaagccaggccgtgggtcgttcgtccttttactgcctggaatatttcccgtcgcaaatgctaagaacgggtaacaacttccagttcagctacgagtttgagaacgtacctttccatagcagctacgctcacagccaaagcctggaccgactaatgaatccactcatcgaccaatacttgtactatctctcaaagactattaacggttctggacagaatcaacaaacgctaaaattcagtgtggccggacccagcaacatggctgtccagggaagaaactacatacctggacccagctaccgacaacaacgtgtctcaaccactgtgactcaaaacaacaacagcgaatttgcttggcctggggcttcttcttgggctctcaatggacgtaatagcttgatgaatcctggacctgctatggccagccacaaagaaggagaggaccgtttctttcctttgtctggatctttaatttttggcaaacaaggaactggaagagacaacgtggatgcggacaaagtcatgataaccaacgaagaagaaattaaaactactaacccggtagcaacggagtcctatggacaagtggccacaaaccaccagagtgcccaagcacaggcgcagaccggctgggttcaaaaccaaggaatacttccgggtatggtttggcaggacagagatgtgtacctgcaaggacccatttgggccaaaattcctcacacgggcggcaactttcacccttctccgctgatgggagggtttggaatgaagcacccgcctcctcagatcctcatcaaaaacacacctgtacctgcggatcctccaacggccttcaacaaggacaagctgaactctttcatcacccagtattctactggccaagtcagcgtggagatcgagtgggagctgcagaaggaaaacagcaagcgctggaacccggagatccagtacacttccaactattacaagtctaataatgttgaatttgctgttaatactggaggtgtatatagtgaaccccgccccattggcaccagatacctgactcgtaatctgtaattgcttgttaatcaataaaccgtttaattcgtttcagttgaactgcggcc

SEQ ID NO: 869 - protein, 736 aa, Artificial Sequence
  Description of Artificial Sequence: Synthetic polypeptide
MAADGYLPDWLEDNLSEGIREWWALKPGAPQPKANQQHQDNARGLVLPGYKYLGPGNGLDKGEPVNAADAAALEHDKAYDQQLKAGDNPYLKYNHADAEFQERLKEDTSFGGNLGRAVFQAKKRLLEPLGLVEEAAKTAPGKKRPVEQSPQEPDSSAGIGKSGAQPAKKRLNFGQTGDTESVPDPQPIGEPPAAPSGVGSLTMASGGGAPVADNNEGADGVGSSSGNWHCDSQWLGDRVITTSTRTWALPTYNNHLYKQISNSTSGGSSNDNAYFGYSTPWGYFDFNRFHCHFSPRDWQRLINNNWGFRPKRLNFKLFNIQVKEVTDNNGVKTIANNLTSTVQVFTDSDYQLPYVLGSAHEGCLPPFPADVFMIPQYGYLTLNDGSQAVGRSSFYCLEYFPSQMLRTGNNFQFSYEFENVPFHSSYAHSQSLDRLMNPLIDQYLYYLSKTINGSGQNQQTLKFSVAGPSNMAVQGRNYIPGPSYRQQRVSTTVTQNNNSEFAWPGASSWALNGRNSLMNPGPAMASHKEGEDRFFPLSGSLIFGKQGTGRDNVDADKVMITNEEEIKTTNPVATESYGQVATNHQSAQAQAQTGWVQNQGILPGMVWQDRDVYLQGPIWAKIPHTGGNFHPSPLMGGFGMKHPPPQILIKNTPVPADPPTAFNKDKLNSFITQYSTGQVSVEIEWELQKENSKRWNPEIQYTSNYYKSNNVEFAVNTGGVYSEPRPIGTRYLTRNL

SEQ ID NO: 870 - DNA, 2601 bp, Artificial Sequence
  Description of Artificial Sequence: Synthetic polynucleotide
ccatcgacgtcagacgcggaagcttcgatcaactacgcggacaggtaccaaaacaaatgttctcgtcacgtgggcatgaatctgatgctgtttccctgcagacaatgcgagagactgaatcagaattcaaatatctgcttcactcacggtgtcaaagactgtttagagtgctttcccgtgtcagaatctcaacccgtttctgtcgtcaaaaaggcgtatcagaaactgtgctacattcatcacatcatgggaaaggtgccagacgcttgcactgcttgcgacctggtcaatgtggactcggatgactgtgtttctgaacaataaatgacttaaaccaggtatggctgccgatggttatcttccagattggctcgaggacaaccttagtgaaggaattcgcgagtggtgggctttgaaacctggagcccctcaacccaaggcaaatcaacaacatcaagacaacgctcgaggtcttgtgcttccgggttacaaataccttggacccggcaacggactcgacaagggggagccggtcaacgcagcagacgcggcggccctcgagcacgacaaggcctacgaccagcagctcaaggccggagacaacccgtacctcaagtacaaccacgccgacgccgagttccaggagcggctcaaagaagatacgtcttttgggggcaacctcgggcgagcagtcttccaggccaaaaagaggcttcttgaacctcttggtctggttgaggaagcggctaagacggctcctggaaagaagaggcctgtagagcagtctcctcaggaaccggactcctccgcgggtattgacaaatcgggtgcacagcccgctaaaaagagactcaatttcggtcagactggcgacacagagtcagtcccagaccctcaaccaatcggagaacctcccgcagccccctcaggtgtgggatctcttacaatggcttcaggtggtggcgcaccagtggcagacaataacgaaggtgccgatggagtgggtagttcctcgggaaattggcattgcgattcccaatggctgggggacagagtcatcaccaccagcacccgaacctgggccctgcccacctacaacaatcacctctacaagcaaatctccaacagcacatctggaggatcttcaaatgacaacgcctacttcggctacagcaccccctgggggtattttgacttcaacagattccactgccacttctcaccacgtgactggcagcgactcatcaacaacaactggggattccggcctaagcgactcaacttcaagctcttcaacattcaggtcaaagaggttacggacaacaatggagtcaagaccatcgccaataaccttaccagcacggtccaggtcttcacggactcggactatcagctcccgtacgtgctcgggtcggctcacgagggctgcctcccgccgttcccagcggacgttttcatgattcctcagtacgggtatctgacgcttaatgatggaagccaggccgtgggtcgttcgtccttttactgcctggaatatttcccgtcgcaaatgctaagaacgggtaacaacttccagttcagctacgagtttgagaacgtacctttccatagcagctacgctcacagccaaagcctggaccgactaatgaatccactcatcgaccaatacttgtactatctctcaaagactattaacggttctggacagaatcaacaaacgctaaaattcagtgtggccggacccagcaacatggctgtccagggaagaaactacatacctggacccagctaccgacaacaacgtgtctcaaccactgtgactcaaaacaacaacagcgaatttgcttggcctggagcttcttcttgggctctcaatggacgtaatagcttgatgaatcctggacctgctatggccagccacaaagaaggagaggaccgtttctttcctttgtctggatctttaatttttggcaaacaaggaactggaagagacaacgtggatgcggacaaagtcatgataaccaacgaagaagaaattaaaactactaacccggtagcaacggagtcctatggacaagtggccacaaaccaccagagtgcccaagcacaggcgcagaccggctgggttcaaaaccaaggaatacttccgggtatggtttggcaggacagagatgtgtacctgcaaggacccatttgggccaaaattcctcacacggacggcaactttcacccttctccgctgatgggagggtttggaatgaagcacccgcctcctcagatcctcatcaaaaacacacctgtacctgcggatcctccaacggccttcaacaaggacaagctgaactctttcatcacccagtattctactggccaagtcagcgtggagatcgagtgggagctgcagaaggaaaacagcaagcgctggaacccggagatccagtacacttccaactattacaagtctaataatgttgaatttgctgttaatactgaaggtgtatatagtgaaccccgccccattggcaccagatacctgactcgtaatctgtaattgcttgttaatcaataaaccgtttaattcgtttcagttgaactgcggcc

SEQ ID NO: 871 - protein, 736 aa, Artificial Sequence
  Description of Artificial Sequence: Synthetic polypeptide
MAADGYLPDWLEDNLSEGIREWWALKPGAPQPKANQQHQDNARGLVLPGYKYLGPGNGLDKGEPVNAADAAALEHDKAYDQQLKAGDNPYLKYNHADAEFQERLKEDTSFGGNLGRAVFQAKKRLLEPLGLVEEAAKTAPGKKRPVEQSPQEPDSSAGIDKSGAQPAKKRLNFGQTGDTESVPDPQPIGEPPAAPSGVGSLTMASGGGAPVADNNEGADGVGSSSGNWHCDSQWLGDRVITTSTRTWALPTYNNHLYKQISNSTSGGSSNDNAYFGYSTPWGYFDFNRFHCHFSPRDWQRLINNNWGFRPKRLNFKLFNIQVKEVTDNNGVKTIANNLTSTVQVFTDSDYQLPYVLGSAHEGCLPPFPADVFMIPQYGYLTLNDGSQAVGRSSFYCLEYFPSQMLRTGNNFQFSYEFENVPFHSSYAHSQSLDRLMNPLIDQYLYYLSKTINGSGQNQQTLKFSVAGPSNMAVQGRNYIPGPSYRQQRVSTTVTQNNNSEFAWPGASSWALNGRNSLMNPGPAMASHKEGEDRFFPLSGSLIFGKQGTGRDNVDADKVMITNEEEIKTTNPVATESYGQVATNHQSAQAQAQTGWVQNQGILPGMVWQDRDVYLQGPIWAKIPHTDGNFHPSPLMGGFGMKHPPPQILIKNTPVPADPPTAFNKDKLNSFITQYSTGQVSVEIEWELQKENSKRWNPEIQYTSNYYKSNNVEFAVNTEGVYSEPRPIGTRYLTRNL

SEQ ID NO: 872 - DNA, 2601 bp, Artificial Sequence
  Description of Artificial Sequence: Synthetic polynucleotide
ccatcgacgtcagacgcggaagcttcgatcaactacgcggacaggtaccaaaacaaatgttctcgtcacgtgggcatgaatctgatgctgtttccctgcagacaatgcgagagactgaatcagaattcaaatatctgcttcactcacggtgtcaaagactgtttagagtgctttcccgtgtcagaatctcaacccgtttctgtcgtcaaaaaggcgtatcagaaactgtgctacattcatcacatcatgggaaaggtgccagacgcttgcactgcttgcgacctggtcaatgtggacttggatgactgtgtttctgaacaataaatgacttaaaccaggtatggctgccgatggttatcttccagattggctcgaggacaaccttagtgaaggaattcgcgagtggtgggctttgaaacctggagcccctcaacccaaggcaaatcaacaacatcaagacaacgctcgaggtcttgtgcttccgggttacaaataccttggacccggcaacggactcgacaagggggagccggtcaacgcagcagacgcggcggccctcgagcacgacaaggcctacgaccagcagctcaaggccggagacaacccgtacctcaagtacaaccacgccgacgccgagttccaggagcggctcaaagaagatacgtcttttgggggcaacctcgggcgagcagtcctccaggccaaaaagaggcttcttgaacctcttggtctggttgaggaagcggctaagacggctcctggaaagaagaggcctgtagagcagtctcctcaggaaccggactcctccgcgggtattggcaaatcgggtgcacagcccgctaaaaagagactcaatttcggtcagactggcgacacagagtcagtcccagaccctcaaccaatcggagaacctcccgcagccccctcaggtgtgggatctcttacaatggcttcaggtggtggcgcaccagtggcagacaataacgaaggtgccgatggagtgggtagttcctcgggaaattggcattgcgattcccaatggctgggggacagagtcatcaccaccagcacccgaacctgggccctgcccacctacaacaatcacctctacaagcaaatctccaacagcacatctggaggatcttcaaatgacaacgcctacttcggctacagcaccccctgggggtattttgacttcaacagattccactgccacttctcaccacgtgactggcagcgactcatcaacaacaactggggattccggcctaagcgactcaacttcaagctcttcaacattcaggtcaaagaggttacggacaacaatggagtcaagaccatcgccaataaccttaccagcacggtccaggtcttcacggactcagactatcagctcccgtacgtgctcgggtcggctcacgagggctgcctcccgccgttcccagcggacgttttcatgattcctcagtacgggtatctgacgcttaatgatggaagccaggccgtgggtcgttcgtccttttactgcctggaatatttcccgtcgcaaatgctaagaacgggtaacaacttccagttcagctacgagtttgagaacgtacctttccatagcagctacgctcacagccaaagcctggaccgactaatgaatccactcatcgaccaatacttgtactatctctcaaagactattaacggttctggacagaatcaacaaacgctaaaattcagtgtggccggatccagcaacatggctgtccagggaagaaactacatacctggacccagctaccgacaacaacgtgtctcaaccactgtgactcaaaacaacaacagcgaatttgcttggcctggagcttcttcttgggctctcaatggacgtaatagcttgatgaatcctggacctgctatggccagccacaaagaaggagaggaccgtttctttcctttgtctggatctttaatttttggcaaacaaggaactggaagagacaacgtggatgcggacaaagtcatgataaccaacgaagaagaaattaaaactactaacccggtagcaacggagtcctatggacaagtggccacaaaccaccagagtgcccaagcacaggcgcagaccggctgggttcaaaaccaaggaatacttccaggtatggtttggcaggacagagatgtgtacctgcaaggacccatttgggccaaaattcctcacacggacggcaactttcacccttctccgctgatgggagggtttggaatgaagcacccgcctcctcagatcctcatcaaaaacacacctgtacctgcggatcctccaacggccttcaacaaggacaagctgaactctttcatcacccagtattctactggccaagtcagcgtggagatcgagtgggagctgcagaaggaaaacagcaagcgctggaacccggagatccagtacacttccaactattacaagtctaataatgttgaatttgctgttaatactgaaggtgtatatagtgaaccccgccccattggcaccagatacctgactcgtaatctgtaattgcttgttaatcaataaaccgtttaattcgtttcagttgaactgcggcc

SEQ ID NO: 873 - protein, 736 aa, Artificial Sequence
  Description of Artificial Sequence: Synthetic polypeptide
MAADGYLPDWLEDNLSEGIREWWALKPGAPQPKANQQHQDNARGLVLPGYKYLGPGNGLDKGEPVNAADAAALEHDKAYDQQLKAGDNPYLKYNHADAEFQERLKEDTSFGGNLGRAVLQAKKRLLEPLGLVEEAAKTAPGKKRPVEQSPQEPDSSAGIGKSGAQPAKKRLNFGQTGDTESVPDPQPIGEPPAAPSGVGSLTMASGGGAPVADNNEGADGVGSSSGNWHCDSQWLGDRVITTSTRTWALPTYNNHLYKQISNSTSGGSSNDNAYFGYSTPWGYFDFNRFHCHFSPRDWQRLINNNWGFRPKRLNFKLFNIQVKEVTDNNGVKTIANNLTSTVQVFTDSDYQLPYVLGSAHEGCLPPFPADVFMIPQYGYLTLNDGSQAVGRSSFYCLEYFPSQMLRTGNNFQFSYEFENVPFHSSYAHSQSLDRLMNPLIDQYLYYLSKTINGSGQNQQTLKFSVAGSSNMAVQGRNYIPGPSYRQQRVSTTVTQNNNSEFAWPGASSWALNGRNSLMNPGPAMASHKEGEDRFFPLSGSLIFGKQGTGRDNVDADKVMITNEEEIKTTNPVATESYGQVATNHQSAQAQAQTGWVQNQGILPGMVWQDRDVYLQGPIWAKIPHTDGNFHPSPLMGGFGMKHPPPQILIKNTPVPADPPTAFNKDKLNSFITQYSTGQVSVEIEWELQKENSKRWNPEIQYTSNYYKSNNVEFAVNTEGVYSEPRPIGTRYLTRNL

SEQ ID NO: 874 - DNA, 2601 bp, Artificial Sequence
  Description of Artificial Sequence: Synthetic polynucleotide
ccatcgacgtcagacgcggaagcttcgatcaactacgcggacaggtaccaaaacaaatgttctcgtcacgtgggcatgaatctgatgctgtttccctgcagacaatgcgagagactgaatcagaattcaaatatctgcttcactcacggtgtcaaagactgtttagagtgctttcccgtgtcagaatctcaacccgtttctgtcgtcaaaaaggcgtatcagaaactgtgctacattcatcacatcatgggaaaggtgccagacgcttgcactgcttgcgacctggtcaatgtggacttggatgactgtgtttctgaacaataaatgacttaaaccaggtatggctgccgatggttatcttccagattggctcgaggacaaccttagtgaaggaattcgcgagtggtgggctttgaaacctggagcccctcaacccaaggcaaatcaacaacatcaagacaacgctcgaggtcttgtgcttccgggttacaaataccttggacccggcaacggactcgacaagggggagccggtcaacgcagcagacgcggcggccctcgagcacgacagggcctacgaccagcagctcaaggccggagacaacccgtacctcaagtacaaccacgccgacgccgagttccaggagcggctcaaagaagatacgtcttttgggggcaacctcgggcgagcagtcttccaggccaaaaagaggcttcttgaacctcttggtctggttgaggaagcggctaagacggctcctggaaagaagaggcctgtagagcagtctcctcaggaaccggactcctccgcgggtattggcaaatcgggtgcacagcccgctaaaaagagactcaatttcggtcagactggcgacacagagtcagtcccagaccctcaaccaatcggagaacctcccgcagccccctcaggtgtgggatctcttacaatggcttcaggtggtggcgcaccagtggcagacaataacgaaggtgccgatggagtgggtagttcctcgggaaattggcattgcgattcccaatggctgggggacagagtcatcaccaccagcacccgaacctgggccctgcccacctacaacaatcacctctacaagcaaatctccaacagcacatctggaggatcttcaaatgacaacgcctacttcggctacagcaccccctgggggtattttgacttcaacagattccactgccacttctcaccacgtgactggcagcgactcatcaacaacaactggggattccggcctaagcgactcaacttcaagctcttcaacattcaggtcaaagaggttacggacaacaatggagtcaagaccatcgccaataaccttaccagcacggtccaggtcttcacggactcagactatcagctcccgtacgtgctcgggtcggctcacgagggctgcctcccgccgttcccagcggacgttttcatgattcctcagtacgggtatctgacgcttaatgatggaagccaggccgtgggtcgttcgtccttttactgcctggaatatttcccgtcgcaaatgctaagaacgggtaacaacttccagttcagctacgagtttgagaacgtacctttccatagcagctacgctcacagccaaagcctggaccgactaatgaatccactcatcgaccaatacttgtactatctctcaaagactattaacggttctggacagaatcaacaaacgctaaaattcagtgtggccggacctagcaacatggctgtccagggaagaaactacatacctggacccagctaccgacaacaacgtgtctcaaccactgtgactcaaaacaacaacagcgaatttgcttggcctggagcttcttcttgggctctcaatggacgtaatagcttgatgaatcctggacctgctatggccagccacaaagaaggagaggaccgtttctttcctttgtctggatctttaatttttggcaaacaaggaactggaagagacaacgtggatgcggacaaagtcatgataaccaacgaagaagaaattaaaactactaacccggtagcaacggagtcctatggacaagtggccacaaaccaccagagtgcccaagcacaggcgcagaccggctgggttcaaaaccaaggaatacttccgggtatggtttggcaggacagagatgtgtacctgcaaggacccatttgggccaaaattcctcacacggacggcaactttcacccttctccgctgatgggagggtttggaatgaagcacccgcctcctcagatcctcatcaaaaacacacctgtacctgcggatcctccaacggccttcaacaaggacaagctgaactctttcatcacccagtattctactggccaagtcagcgtggagatcgagtgggagctgcagaagaaaaacagcaagcgctggaacccggagatccagtacacttccaactattacaagtctaataatgttgaatttgctgttaacactgaaggtgtatatagtgaaccccgccccattggcaccagatacctgactcgtaatctgtaattgcttgttaatcaataaaccgtttaattcgtttcagttgaactgcggcc

SEQ ID NO: 875 - protein, 736 aa, Artificial Sequence
  Description of Artificial Sequence: Synthetic polypeptide
MAADGYLPDWLEDNLSEGIREWWALKPGAPQPKANQQHQDNARGLVLPGYKYLGPGNGLDKGEPVNAADAAALEHDRAYDQQLKAGDNPYLKYNHADAEFQERLKEDTSFGGNLGRAVFQAKKRLLEPLGLVEEAAKTAPGKKRPVEQSPQEPDSSAGIGKSGAQPAKKRLNFGQTGDTESVPDPQPIGEPPAAPSGVGSLTMASGGGAPVADNNEGADGVGSSSGNWHCDSQWLGDRVITTSTRTWALPTYNNHLYKQISNSTSGGSSNDNAYFGYSTPWGYFDFNRFHCHFSPRDWQRLINNNWGFRPKRLNFKLFNIQVKEVTDNNGVKTIANNLTSTVQVFTDSDYQLPYVLGSAHEGCLPPFPADVFMIPQYGYLTLNDGSQAVGRSSFYCLEYFPSQMLRTGNNFQFSYEFENVPFHSSYAHSQSLDRLMNPLIDQYLYYLSKTINGSGQNQQTLKFSVAGPSNMAVQGRNYIPGPSYRQQRVSTTVTQNNNSEFAWPGASSWALNGRNSLMNPGPAMASHKEGEDRFFPLSGSLIFGKQGTGRDNVDADKVMITNEEEIKTTNPVATESYGQVATNHQSAQAQAQTGWVQNQGILPGMVWQDRDVYLQGPIWAKIPHTDGNFHPSPLMGGFGMKHPPPQILIKNTPVPADPPTAFNKDKLNSFITQYSTGQVSVEIEWELQKKNSKRWNPEIQYTSNYYKSNNVEFAVNTEGVYSEPRPIGTRYLTRNL

SEQ ID NO: 876 - DNA, 2601 bp, Artificial Sequence
  Description of Artificial Sequence: Synthetic polynucleotide
ccatcgacgtcagacgcggaagcttcgatcaactacgcggacaggtaccaaaacaaatgttctcgtcacgtgggcatgaatctgatgctgtttccctgcagacaatgcgagagactgaatcagaattcaaatatctgcttcactcacggtgtcaaagactgtttagagtgctttcccgtgtcagaatctcaacccgtttctgtcgtcaaaaaggcgtatcagaaactgtgctacattcatcacatcatgggaaaggtgccagacgcttgcactgcttgcgacctggtcaatgtggacttggatgactgtgtttctgaacaataaatgacttaaaccaggtatggctgccgatggttatcttccagattggctcgaggacaaccttagtgaaggaattcgcgagtggtgggctttgaaacctggagcccctcaacccaaggcaaatcaacaacatcaagacaacgctcgaggtcttgtgcttccgggttacaaataccttggacccggcaacggactcgacaagggggagccggtcaacgcagcagacgcggcggccctcgagcacgacaaggcctacgaccagcagctcaaggccggagacaacccgtacctcaagtacaaccacgccgacgccgagttccaggagcggctcaaagaagatacgtcttttgggggcaacctcgggcgagcagtcttccaggccaaaaagaggcttcttgaacctcttggtctggttgaggaagcggctaagacggctcctggaaagaagaggcctgtagagcagtctcctcaggaaccggactcctccgcgggtattggcaaatcgggtgcacagcccgctaaaaagagactcaatttcggtcagactggcgacacagagtcagtcccagaccctcaaccaatcggagaacctcccgcagccccctcaggtgtgggatctcttacaatggcttcaggtggtggcgcaccagtggcagacaataacgaaggtgccgatggagtgggtagttcctcgggaaattggcattgcgattcccaatggctgggggacagagtcatcaccaccagcacccgaacctgggccctgcccacctacaacaatcacctctacaagcaaatctccaacagcacatctggaggatcttcaaatgacaacgcctacttcggctacagcaccccctgggggtattttgacttcaacagattccactgccacttctcaccacgtgactggcagcgactcatcaacaacaactggggattccggcctaagcgactcaacttcaagctcttcaacattcaggtcaaagaggttacggacaacaatggagtcaagaccatcgccaataaccttaccagcacggtccaggtcttcacggactcagactatcagctcccgtacgtgctcgggtcggctcacgagggctgcctcccgccgttcccagcggacgttttcatgattcctcagtacgggtatctgacgcttaatgatggaagccaggccgtgggtcgttcgtccttttactgcctggaatatttcccgtcgcaaatgctaagaacgggtaacaacttccagttcagctacgagtttgagaacgtacctttccatagcagctacgctcacagccaaagcctggaccgactaatgaatccactcatcgaccaatacttgtactatctctcaaagactattaacggttctggacagaatcaacaaacgctaaaattcagtgtggccggacccagcaacatggctgtccagggaagaaactacatacctggacccagctaccgacaacaacgtgtctcaaccactgtgactcaaaacaacaacagcgaatttgcttggcctggagcttcttcttgggctctcaatggacgtaatagcttgatgaatcctggacctgctatggccagccacaaagaaggagaggaccgtttctttcctttgtctggatctttaatttttggcaaacaaggaactggaagagacaacgtggatgcggacaaagtcatgataaccaacgaagaagaaattaaaactactaacccggtagcaacggagtcctatggacaagtggccacaaaccaccagagtgcccaagcacgggcgcagaccggctgggttcaaaaccaaggaatacttccgggtatggtttggcaggacagagatgtgtacctgcaaggacccatttgggccaaaattcctcacacggacggcaactttcacccttctccgctgatgggagggtttggaatgaagcacccgcctcctcagatcctcatcaaaaacacacctgtacctgcggatcctccaacggccttcaacaaggacaagctgaactctttcatcacccagtattctactggccaagtcagcgtggagatcgagtgggagctgcagaaggaaaacagcaagcgctggaacccggagatccagtacacttccaactattacaagtctaataatgttgaatttgctgttaatactgaaggtgtatatagtgaaccccgccccattggcaccagatacctgactcgtaatctgtaattgcttgttaatcaataaaccgtttaattcgtttcagttgaactgcggcc

SEQ ID NO: 877 - protein, 736 aa, Artificial Sequence
  Description of Artificial Sequence: Synthetic polypeptide
MAADGYLPDWLEDNLSEGIREWWALKPGAPQPKANQQHQDNARGLVLPGYKYLGPGNGLDKGEPVNAADAAALEHDKAYDQQLKAGDNPYLKYNHADAEFQERLKEDTSFGGNLGRAVFQAKKRLLEPLGLVEEAAKTAPGKKRPVEQSPQEPDSSAGIGKSGAQPAKKRLNFGQTGDTESVPDPQPIGEPPAAPSGVGSLTMASGGGAPVADNNEGADGVGSSSGNWHCDSQWLGDRVITTSTRTWALPTYNNHLYKQISNSTSGGSSNDNAYFGYSTPWGYFDFNRFHCHFSPRDWQRLINNNWGFRPKRLNFKLFNIQVKEVTDNNGVKTIANNLTSTVQVFTDSDYQLPYVLGSAHEGCLPPFPADVFMIPQYGYLTLNDGSQAVGRSSFYCLEYFPSQMLRTGNNFQFSYEFENVPFHSSYAHSQSLDRLMNPLIDQYLYYLSKTINGSGQNQQTLKFSVAGPSNMAVQGRNYIPGPSYRQQRVSTTVTQNNNSEFAWPGASSWALNGRNSLMNPGPAMASHKEGEDRFFPLSGSLIFGKQGTGRDNVDADKVMITNEEEIKTTNPVATESYGQVATNHQSAQARAQTGWVQNQGILPGMVWQDRDVYLQGPIWAKIPHTDGNFHPSPLMGGFGMKHPPPQILIKNTPVPADPPTAFNKDKLNSFITQYSTGQVSVEIEWELQKENSKRWNPEIQYTSNYYKSNNVEFAVNTEGVYSEPRPIGTRYLTRNL

SEQ ID NO: 878 - DNA, 2601 bp, Artificial Sequence
  Description of Artificial Sequence: Synthetic polynucleotide
ccatcgacgtcagacgcggaagcttcgatcaactacgcggacaggtaccaaaacaaatgttctcgtcacgtgggcatgaatctgatgctgtttccctgcagacaatgcgagagactgaatcagaattcaaatatctgcttcactcacggtgtcaaagactgtttagagtgctttcccgtgtcagaatctcaacccgtttctgtcgtcaaaaaggcgtatcagaaactgtgctacattcatcacatcatgggaaaggtgccagacgcttgcactgcttgcgacctggtcaatgtggacttggatgactgtgtttctgaacaataaatgacttaaaccaggtatggctgccgatggttatcttccagattggctcgaggacaaccttagtgaaggaattcgcgagtggtgggctttgaaacctggagcccctcaacccaaggcaaatcaacaacatcaagacaacgctcgaggtcttgtgcttccgggttacaaataccttggacccggcaacggactcgacaagggggagccggtcaacgcagtagacgcggcggccctcgagcacgacaaggcctacgaccagcagctcaaggccggagacaacccgtacctcaagtacaaccacgccgacgccgagttccaggagcggctcaaagaagatacgtcttttgggggcaacctcgggcgagcagtcttccaggccaaaaagaggcttcttgaacctcttggtctggttgaggaagcggctaagacggctcctggaaagaagaggcctgtagagcagtctcctcaggaaccggactcctccgcgggtattggcaaatcgggtgcacagcccgctaaaaagagactcaatttcggtcagactggcgacacagagtcagtcccagaccctcaaccaatcggagaacctcccgcagccccctcaggtgtgggatctcttacaatggcttcaggtggtggcgcaccagtggcagacaataacgaaggtgccgatggagtgggtagttcctcgggaaattggcattgcgattcccaatggctgggggacagagtcatcaccaccagcacccgaacctgggccctgcccacctacaacaatcacctctacaagcaaatctccaacagcacatctggaggatcttcaaatgacaacgcctacttcggctacagcaccccctgggggtattttgacttcaacagattccactgccacttctcaccacgtgactggcagcgactcatcaacaacaactggggatttcggcctaagcgactcaacttcaagctcttcaacattcaggtcaaagaggttacggacaacaatggagtcaagaccatcgccaataaccttaccagcacggtccaggtcttcacggactcagactatcagctcccgtacgtgctcgggtcggctcacgagggctgcctcccgccgttcccagcggacgttttcatgattcctcagtacgggtatctgacgcttaatgatggaagccaggccgtgggtcgttcgtccttttactgcctggaatatttcccgtcgcaaatgctaagaacgggtaacaacttccagttcagctacgagtttgagaacgtacctttccatagcagctacgctcacagccaaagcctggaccgactaatgaatccactcatcgaccaatacttgtactatctctcaaagactattaacggttctggacagaatcaacaaacgctaaaattcagtgtggccggacccagcaacatggctgtccagggaagaaactacatacctggacccagctaccgacaacaacgtgtctcaaccactgtgactcaaaacaacaacagcgaatttgcttggcctggagcttcttcttgggctctcaatggacgtaatagcttgatgaatcctggacctgctatggccagccacaaagaaggagaggaccgtttctttcctttgtctggatctttaatttttggcaaacaaggaactggaagagacaacgtggatgcggacaaagtcatgataaccaacgaagaagaaattaaaactactaacccggtagcaacggagtcctatggacaagtggccacaaaccaccagagtgcccaagcacaggcgcagaccggctgggttcaaaaccaaggaatacttccgggtatggtttggcaggacagagatgtgtacctgcaaggacccatttgggccaaaattcctcacacggacggcaactttcacccttctccgctgatgggagggtttggaatgaagcacccgcctcctcagatcctcatcaaaaacacacctgtacctgcggatcctccaacggccttcaacaaggacaagctgaactctttcatcacccagtattctactggccaagtcagcgtggagatcgagtgggagctgcagaaggaaaacagcaagcgctggaacccggagatccagtacacttccaactattacaagtctaataatgttgaatttgctgttaatactgaaggtgtatatagtgaaccccgccccattggcaccagatacctgactcgtaatctgtaattgcttgttaatcaataaaccgtttaattcgtttcagttgaactgcggcc

SEQ ID NO: 879 - protein, 736 aa, Artificial Sequence
  Description of Artificial Sequence: Synthetic polypeptide
MAADGYLPDWLEDNLSEGIREWWALKPGAPQPKANQQHQDNARGLVLPGYKYLGPGNGLDKGEPVNAVDAAALEHDKAYDQQLKAGDNPYLKYNHADAEFQERLKEDTSFGGNLGRAVFQAKKRLLEPLGLVEEAAKTAPGKKRPVEQSPQEPDSSAGIGKSGAQPAKKRLNFGQTGDTESVPDPQPIGEPPAAPSGVGSLTMASGGGAPVADNNEGADGVGSSSGNWHCDSQWLGDRVITTSTRTWALPTYNNHLYKQISNSTSGGSSNDNAYFGYSTPWGYFDFNRFHCHFSPRDWQRLINNNWGFRPKRLNFKLFNIQVKEVTDNNGVKTIANNLTSTVQVFTDSDYQLPYVLGSAHEGCLPPFPADVFMIPQYGYLTLNDGSQAVGRSSFYCLEYFPSQMLRTGNNFQFSYEFENVPFHSSYAHSQSLDRLMNPLIDQYLYYLSKTINGSGQNQQTLKFSVAGPSNMAVQGRNYIPGPSYRQQRVSTTVTQNNNSEFAWPGASSWALNGRNSLMNPGPAMASHKEGEDRFFPLSGSLIFGKQGTGRDNVDADKVMITNEEEIKTTNPVATESYGQVATNHQSAQAQAQTGWVQNQGILPGMVWQDRDVYLQGPIWAKIPHTDGNFHPSPLMGGFGMKHPPPQILIKNTPVPADPPTAFNKDKLNSFITQYSTGQVSVEIEWELQKENSKRWNPEIQYTSNYYKSNNVEFAVNTEGVYSEPRPIGTRYLTRNL

SEQ ID NO: 880 - DNA, 2580 bp, Artificial Sequence
  Description of Artificial Sequence: Synthetic polynucleotide
ccatcgacgtcagacgcggaagcttcgatcaactacgcggacaggtaccaaaacaaatgttctcgtcacgtgggcatgaatctgatgctgtttccctgcagacaatgcgagagactgaatcagaattcaaatatctgcttcactcacggtgtcaaagactgtttagagtgctttcccgtgtcagaatctcaacccgtttctgtcgtcaaaaaggcgtatcagaaactgtgctacattcatcacatcatgggaaaggtgccagacgcttgcactgcttgcgacctggtcaatgtggacttggatgactgtgtttctgaacaataaatgacttaaaccaggtatggctgccgatggttatcttccagattggctcgaggacaaccttagtgaaggaattcgcgagtggtgggctttgaaacctggagcccctcaacccaaggcaaatcaacaacatcaagacaacgctcgaggtcttgtgcttccgggttacaaataccttggacccggcaacggactcgacaagggggagccggtcaacgcagcagacgcggcggccctcgagcacgacaaggcctacgaccagcagctcaaggccggagacaacccgtacctcaagtacaaccacgccgacgccgagttccaggagcggctcaaagaagatacgtcttttgggggcaacctcgggcgagcagtcttccaggccaaaaagaggcttcttgaacctcttggtctggttgaggaagcggctaagacggctcctggaaagaagaggcctgtagagcagtctcctcgggaaccggactcctccgcgggtattggcaaatcgggtgcacagcccgctaaaaagagactcaatttcggtcagactggcgacacagagtcagtcccagaccctcaaccaatcggagaacctcccgcagccccctcaggtgtgggatctcttacaatggcttcaggtggtggcgcaccagtggcagacaataacgaaggtgccgatggagtgggtagttcctcgggaaattggcattgcgattcccaatggctgggggacagagtcatcaccaccagcacccgaacctgggccctgcccacctacaacaatcacctctacaagcaaatctccaacagcacatctggaggatcttcaaatgacaacgcctacttcggctacagcaccccctgggggtattttgacttcaacagattccactgccacttctcaccacgtgactggcagcgactcatcaacaacaactggggattccggcctaagcgactcaacttcaagctcttcaacattcaggtcaaagaggttacggacaacaatggagtcaagaccatcgccaataaccttaccagcacggtccaggtcttcacggactcagactatcagctcccgtacgtgctcgggtcggctcacgagggctgcctcccgccgttcccagcggacgttttcatgattcctcagtacgggtatctgacgcttaatgatggaagccaggccgtgggtcgttcgtccttttactgcctggaatatttcccgtcgcaaatgctaagaacgggtaacaacttccagttcagctacgagtttgagaacgtacctttccatagcagctacgctcacagccaaagcctggaccgactaatgaatccactcatcgaccaatacttgtactatctctcaaagactattaacggttctggacagaatcaacaaacgctaaaattcagtgtggccggacccagcaacatggctgtccagggaagaaactacatacctggacccagctaccgacaacaacgtgtctcaaccactgtgactcaaaacaacaacagcgaatttgcttggcctggagcttcttcttgggctctcaatggacgtaatagcttgatgaatcctggacctgctatggccagccacaaagaaggagaggaccgtttctttcctttgtctggatctttaatttttggcaaacaaggaactggaagagacaacgtggatgcggacaaagtcatgataaccaacgaagaagaaattaaaactactaacccggtagcaacggagtcctatggacaagtggccacaaaccaccagagtgcccaagcacaggcgcagaccggctgggttcaaaaccaaggaatacttccgggtatggtttggcaggacagagatgtgtacctgcaaggacccatttgggccaaaattcctcacacggacggcaactttcacccttctccgctgatgggagggtttggaatgaagcacccgcctcctcagatcctcatcaaaaacacacctgtacctgcggatcctccaacggccttcaacaaggacaagctgaactctttcatcacccagtattctactggccaagtcagcgtggagatcgagtgggaactgcagaaggaaaacagcaagcgctggaacccggagatccagtacacttccaactattacaagtctaataatgttgaatttgctgttaatactgaaggtgtatatagtgaaccccgccccattggcaccagatacctgactcgtaatctgtaattgcttgttaatcaataaaccgtttaatt

SEQ ID NO: 881 - protein, 736 aa, Artificial Sequence
  Description of Artificial Sequence: Synthetic polypeptide
MAADGYLPDWLEDNLSEGIREWWALKPGAPQPKANQQHQDNARGLVLPGYKYLGPGNGLDKGEPVNAADAAALEHDKAYDQQLKAGDNPYLKYNHADAEFQERLKEDTSFGGNLGRAVFQAKKRLLEPLGLVEEAAKTAPGKKRPVEQSPREPDSSAGIGKSGAQPAKKRLNFGQTGDTESVPDPQPIGEPPAAPSGVGSLTMASGGGAPVADNNEGADGVGSSSGNWHCDSQWLGDRVITTSTRTWALPTYNNHLYKQISNSTSGGSSNDNAYFGYSTPWGYFDFNRFHCHFSPRDWQRLINNNWGFRPKRLNFKLFNIQVKEVTDNNGVKTIANNLTSTVQVFTDSDYQLPYVLGSAHEGCLPPFPADVFMIPQYGYLTLNDGSQAVGRSSFYCLEYFPSQMLRTGNNFQFSYEFENVPFHSSYAHSQSLDRLMNPLIDQYLYYLSKTINGSGQNQQTLKFSVAGPSNMAVQGRNYIPGPSYRQQRVSTTVTQNNNSEFAWPGASSWALNGRNSLMNPGPAMASHKEGEDRFFPLSGSLIFGKQGTGRDNVDADKVMITNEEEIKTTNPVATESYGQVATNHQSAQAQAQTGWVQNQGILPGMVWQDRDVYLQGPIWAKIPHTDGNFHPSPLMGGFGMKHPPPQILIKNTPVPADPPTAFNKDKLNSFITQYSTGQVSVEIEWELQKENSKRWNPEIQYTSNYYKSNNVEFAVNTEGVYSEPRPIGTRYLTRNL

SEQ ID NO: 882 - DNA, 2601 bp, Artificial Sequence
  Description of Artificial Sequence: Synthetic polynucleotide
ccatcgacgtcagacgcggaagcttcgatcaactacgcggacaggtaccaaaacaaatgttctcgtcacgtgggcatgaatctgatgctgtttccctgcagacaatgcgagagactgaatcagaattcaaatatctgcttcactcacggtgtcaaagactgtttagagtgctttcccgtgtcagaatctcaacccgtttctgtcgtcaaaaaggcgtatcagaaactgtgctacattcatcacatcatgggaaaggtgccagacgcttgcactgcttgcgacctggtcaatgtggacttggatgactgtgtttctgaacaataaatgacttaaaccaggtatggctgccgatggttatcttccagattggctcgaggacaaccttagtgaaggaattcgcgagtggtgggctttgaaacctggagcccctcaacccaaggcaaatcaacaacatcaagacaacgctcgaggtcttgtgcttccgggttacaaataccttggacccggcaacggactcgacaagggggagccggtcaacgcagcagacgcggcggccctcgagcacgacaaggcctacgaccagcagctcaaggccggagacaacccgtacctcaagtacaaccacgccgacgccgagttccaggagcggctcaaagaagatacgtcttttgggggcaacctcgggcgagcagtctttcaggccaaaaagaggcttcttgaacctcttggtctggttgaggaagcggctaagacggctcctggaaagaagaggcctgtagagcagtctcctcaggaaccggactcctccgcgggtattggcaaatcgggtgcacagcccgctaaaaagagactcaatttcggtcagactggcgacacagagtcagtcccagaccctcaaccaatcggagaacctcccgcagccccctcaggtgtgggatctcttacaatggcttcatgtggtggcgcaccagtggcagacaataacgaaggtgccgatggagtgggtagttcctcgggaaattggcattgcgattcccaatggctgggggacagagtcatcaccaccagcacccgaacctgggccctgcccacctacaacaatcacctctacaagcaaatctccaacagcacatctggaggatcttcaaatgacaacgcctacttcggctacagcaccccctgggggtattttgacttcaacagattccactgccacttctcaccacgtgactggcagcgactcatcaacaacaactggggattccggcctaagcgactcaacttcaagctcttcaacattcaggtcaaagaggttacggacaacaatggagtcaagaccatcgccaataaccttaccagcacggtccaggtcttcacggactcagactatcagctcccgtacgtgctcgggtcggctcacgagggctgcctcccgccgttcccagcggacgttttcatgattcctcagtacgggtatctgacgcttaatgatggaagccaggccgtgggtcgttcgtccttttactgcctggaatatttcccgtcgcaaatgctaagaacgggtaacaacttccagttcagctacgagtttgagaacgtacctttccatagcagctacgctcacagccaaagcctggaccgactaatgaatccactcatcgaccaatacttgtactatctctcaaagactattaacggttctggacagaatcaacaaacgctaaaattcagtgtggccggacccagcaacatggctgtccagggaagaaactacatacctggacccagctaccgacaacaacgtgtctcaaccactgtgactcaaaacaacaacagcgaatttgcttggcctggagcttcttcttgggctctcaatggacgtaatagcttgatgaatcctggacctgctatggccagccacaaagaaggagaggaccgtttctttcctttgtctggatctttaatttttggcaaacaaggaactggaagagacaacgtggatgcggacaaagtcatgataaccaacgaagaagaaattaaaactactaacccggtagcaacggagtcctatggacaagtggccacaaaccaccagagtgcccaagcacaggcgcagaccggctgggttcaaaaccaaggaatacttccgggtatggtttggcaggacagagatgtgtacctgcaaggacccatttgggccaaaattcctcacacggacggcaactttcacccttctccgctgatgggagggtttggaatgaagcacccgcctcctcagatcctcatcaaaaacacacctgtacctgcggatcctccaacggccttcaacaaggacaagctgaactctttcatcacccagtattctactggccaagtcagcgtggagatcgagtgggagctgcagaaggaaaacagcaagcgctggaacccggagatccagtacacttccaactattacaagtctaataatgttgaatttgctgttaatactgaaggtgtatatagtgaaccccgccccattggcaccagatacctgactcgtaatctgtaattgcttgttaatcaataaaccgtttaattcgtttcagttgaactgcggcc

SEQ ID NO: 883 - protein, 736 aa, Artificial Sequence
  Description of Artificial Sequence: Synthetic polypeptide
MAADGYLPDWLEDNLSEGIREWWALKPGAPQPKANQQHQDNARGLVLPGYKYLGPGNGLDKGEPVNAADAAALEHDKAYDQQLKAGDNPYLKYNHADAEFQERLKEDTSFGGNLGRAVFQAKKRLLEPLGLVEEAAKTAPGKKRPVEQSPQEPDSSAGIGKSGAQPAKKRLNFGQTGDTESVPDPQPIGEPPAAPSGVGSLTMASCGGAPVADNNEGADGVGSSSGNWHCDSQWLGDRVITTSTRTWALPTYNNHLYKQISNSTSGGSSNDNAYFGYSTPWGYFDFNRFHCHFSPRDWQRLINNNWGFRPKRLNFKLFNIQVKEVTDNNGVKTIANNLTSTVQVFTDSDYQLPYVLGSAHEGCLPPFPADVFMIPQYGYLTLNDGSQAVGRSSFYCLEYFPSQMLRTGNNFQFSYEFENVPFHSSYAHSQSLDRLMNPLIDQYLYYLSKTINGSGQNQQTLKFSVAGPSNMAVQGRNYIPGPSYRQQRVSTTVTQNNNSEFAWPGASSWALNGRNSLMNPGPAMASHKEGEDRFFPLSGSLIFGKQGTGRDNVDADKVMITNEEEIKTTNPVATESYGQVATNHQSAQAQAQTGWVQNQGILPGMVWQDRDVYLQGPIWAKIPHTDGNFHPSPLMGGFGMKHPPPQILIKNTPVPADPPTAFNKDKLNSFITQYSTGQVSVEIEWELQKENSKRWNPEIQYTSNYYKSNNVEFAVNTEGVYSEPRPIGTRYLTRNL

SEQ ID NO: 884 - protein, 9 aa, Artificial Sequence
  Description of Artificial Sequence: Synthetic polypeptide
SADNNNSEY

SEQ ID NO: 885 - protein, 9 aa, Artificial Sequence
  Description of Artificial Sequence: Synthetic polypeptide
LIDQYLYYL

SEQ ID NO: 886 - protein, 9 aa, Artificial Sequence
  Description of Artificial Sequence: Synthetic polypeptide
VPQYGYLTL

SEQ ID NO: 887 - protein, 9 aa, Artificial Sequence
  Description of Artificial Sequence: Synthetic polypeptide
TTSTRTWAL

SEQ ID NO: 888 - protein, 9 aa, Artificial Sequence
  Description of Artificial Sequence: Synthetic polypeptide
YHLNGRDSL

SEQ ID NO: 889 - protein, 9 aa, Artificial Sequence
  Description of Artificial Sequence: Synthetic polypeptide
SQAVGRSSF

SEQ ID NO: 890 - protein, 9 aa, Artificial Sequence
  Description of Artificial Sequence: Synthetic polypeptide
VPANPSTTF

SEQ ID NO: 891 - protein, 9 aa, Artificial Sequence
  Description of Artificial Sequence: Synthetic polypeptide
FPQSGVLIF

SEQ ID NO: 892 - protein, 15 aa, Artificial Sequence
  Description of Artificial Sequence: Synthetic polypeptide
YFDFNRFHCHFSPRD

SEQ ID NO: 893 - protein, 15 aa, Artificial Sequence
  Description of Artificial Sequence: Synthetic polypeptide
VGNSSGNWHCDSTWM

SEQ ID NO: 894 - protein, 15 aa, Artificial Sequence
  Description of Artificial Sequence: Synthetic polypeptide
QFSQAGASDIRDQSR

SEQ ID NO: 895 - protein, 13 aa, Artificial Sequence
  Description of Artificial Sequence: Synthetic polypeptide
GASDIRQSRNWLP

SEQ ID NO: 896 - protein, 15 aa, Artificial Sequence
  Description of Artificial Sequence: Synthetic polypeptide
GNRQAATADVNTQGV

SEQ ID NO: 897 - protein, 9 aa, Artificial Sequence
  Description of Artificial Sequence: Synthetic polypeptide
LDRLMNPLI

SEQ ID NO: 898 - protein, 9 aa, Artificial Sequence
  Description of Artificial Sequence: Synthetic polypeptide
QPAKKRLNF
